United States Patent Application Publication US 2020/0163878 A1 - sequence listing, part 59

SEQ ID NO: 224207 - RNA, 1948 nt, Artificial Sequence
  mRNA product Design1 comprising derived and/or modified sequence from hemagglutinin__InfluenzaA__ABP51976/m1 HsCD5(1-24)_H5N1(Vietnam2004)-HA (CDS opt1)
gggagaaagcuuaccaugcccaugggcagccugcagccgcucgccacccuguaccugcucgggaugcugguggccuccugccugggcgaccagaucugcaucggcuaccacgccaacaacagcaccgagcagguggacaccaucauggagaagaacgucacggugacccacgcgcaggacauccuggagaagacccacaacgggaagcucugcgaccuggacggcgugaagccccugauccuccgggacugcuccgucgccggguggcugcugggcaacccgaugugcgacgaguucaucaacgugcccgaguggagcuacaucguggagaaggccaaccccgucaacgaccucugcuaccccggggacuucaacgacuacgaggagcugaagcaccugcucucccgcaucaaccacuucgagaagauccagaucaucccgaagagcuccuggagcucccacgaggccagccugggcguguccagcgccugccccuaccagggcaaguccagcuucuuccggaacguggucuggcugaucaagaagaacuccaccuaccccacgaucaagcgcagcuacaacaacaccaaccaggaggaccuccuggugcugugggggauccaccaccccaacgacgcggccgagcagaccaagcucuaccagaacccgaccacguacaucuccgugggcaccagcacccugaaccagcggcuggucccccgcaucgccacccgguccaaggugaacgggcagagcggccgcauggaguucuucuggacgauccucaagcccaacgacgccaucaacuucgagagcaacgggaacuucaucgcgcccgaguacgccuacaagaucgugaagaagggcgacuccaccaucaugaagagcgagcuggaguacggcaacugcaacaccaagugccagaccccgaugggggccaucaacuccagcaugcccuuccacaacauccacccccugacgaucggcgagugccccaaguacgucaaguccaaccggcucgugcuggccaccgggcugcgcaacagcccgcagcgggagcggcgccggaagaagcgcggccucuucggcgccaucgcgggguucaucgagggcggguggcagggcaugguggacgggugguacggcuaccaccacuccaacgagcagggcagcggguacgccgccgacaaggaguccacccagaaggccaucgacggcgucacgaacaaggugaacagcaucaucgacaagaugaacacccaguucgaggccguggggcgggaguucaacaaccuggagcgccggaucgagaaccugaacaagaagauggaggacggcuuccucgacgucuggaccuacaacgcggagcugcuggugcucauggagaacgagcgcacccuggacuuccacgacuccaacgucaagaaccuguacgacaaggugcggcuccagcugcgcgacaacgccaaggagcuggggaacggcugcuucgaguucuaccacaagugcgacaacgagugcauggagagcgugcggaacggcacguacgacuacccccaguacuccgaggaggcccgccucaagcgggaggagaucagcggggucaagcuggaguccaucggcaucuaccagauccugagcaucuacuccaccguggccagcucccucgcccuggcgaucaugguggccgggcugagccucuggaugugcagcaacggcucccugcagugccgcaucugcaucugaggacuaguuauaagacugacuagcccgaugggccucccaacgggcccuccuccccuccuugcaccgagauuaauaaaaaaaaaaaaaaaaaaaaaaaaaaaaaaaaaaaaaaaaaaaaaaaaaaaaaaaaaaaaaaaaugcaucccccccccccccccccccccccccccccccaaaggcucuuuucagagccaccagaauu

SEQ ID NO: 224208 - RNA, 2113 nt, Artificial Sequence
  mRNA product Design2 comprising derived and/or modified sequence from hemagglutinin__InfluenzaA__ABP51976/m1 HsCD5(1-24)_H5N1(Vietnam2004)-HA (CDS opt1)
ggggcgcugccuacggagguggcagccaucuccuucucggcaucaagcuuaccaugcccaugggcagccugcagccgcucgccacccuguaccugcucgggaugcugguggccuccugccugggcgaccagaucugcaucggcuaccacgccaacaacagcaccgagcagguggacaccaucauggagaagaacgucacggugacccacgcgcaggacauccuggagaagacccacaacgggaagcucugcgaccuggacggcgugaagccccugauccuccgggacugcuccgucgccggguggcugcugggcaacccgaugugcgacgaguucaucaacgugcccgaguggagcuacaucguggagaaggccaaccccgucaacgaccucugcuaccccggggacuucaacgacuacgaggagcugaagcaccugcucucccgcaucaaccacuucgagaagauccagaucaucccgaagagcuccuggagcucccacgaggccagccugggcguguccagcgccugccccuaccagggcaaguccagcuucuuccggaacguggucuggcugaucaagaagaacuccaccuaccccacgaucaagcgcagcuacaacaacaccaaccaggaggaccuccuggugcugugggggauccaccaccccaacgacgcggccgagcagaccaagcucuaccagaacccgaccacguacaucuccgugggcaccagcacccugaaccagcggcuggucccccgcaucgccacccgguccaaggugaacgggcagagcggccgcauggaguucuucuggacgauccucaagcccaacgacgccaucaacuucgagagcaacgggaacuucaucgcgcccgaguacgccuacaagaucgugaagaagggcgacuccaccaucaugaagagcgagcuggaguacggcaacugcaacaccaagugccagaccccgaugggggccaucaacuccagcaugcccuuccacaacauccacccccugacgaucggcgagugccccaaguacgucaaguccaaccggcucgugcuggccaccgggcugcgcaacagcccgcagcgggagcggcgccggaagaagcgcggccucuucggcgccaucgcgggguucaucgagggcggguggcagggcaugguggacgggugguacggcuaccaccacuccaacgagcagggcagcggguacgccgccgacaaggaguccacccagaaggccaucgacggcgucacgaacaaggugaacagcaucaucgacaagaugaacacccaguucgaggccguggggcgggaguucaacaaccuggagcgccggaucgagaaccugaacaagaagauggaggacggcuuccucgacgucuggaccuacaacgcggagcugcuggugcucauggagaacgagcgcacccuggacuuccacgacuccaacgucaagaaccuguacgacaaggugcggcuccagcugcgcgacaacgccaaggagcuggggaacggcugcuucgaguucuaccacaagugcgacaacgagugcauggagagcgugcggaacggcacguacgacuacccccaguacuccgaggaggcccgccucaagcgggaggagaucagcggggucaagcuggaguccaucggcaucuaccagauccugagcaucuacuccaccguggccagcucccucgcccuggcgaucaugguggccgggcugagccucuggaugugcagcaacggcucccugcagugccgcaucugcaucugaggacuagugcaucacauuuaaaagcaucucagccuaccaugagaauaagagaaagaaaaugaagaucaauagcuuauucaucucuuuuucuuuuucguugguguaaagccaacacccugucuaaaaaacauaaauuucuuuaaucauuuugccucuuuucucugugcuucaauuaauaaaaaauggaaagaaccuagaucuaaaaaaaaaaaaaaaaaaaaaaaaaaaaaaaaaaaaaaaaaaaaaaaaaaaaaaaaaaaaaaaaugcaucccccccccccccccccccccccccccccccaaaggcucuuuucagagccaccagaauu

SEQ ID NO: 224209 - RNA, 1948 nt, Artificial Sequence
  mRNA product Design1 comprising derived and/or modified sequence from hemagglutinin__InfluenzaA__ABP51976/m1 HLA-A2-SP_H5N1(Vietnam2004)-HA (CDS opt1)
gggagaaagcuuaccauggccgugauggccccgcggacccugguccuccugcugagcggcgcgcucgcccugacccagacgugggccgaccagaucugcaucggcuaccacgccaacaacagcaccgagcagguggacaccaucauggagaagaacgucacggugacccacgcgcaggacauccuggagaagacccacaacgggaagcucugcgaccuggacggcgugaagccccugauccuccgggacugcuccgucgccggguggcugcugggcaacccgaugugcgacgaguucaucaacgugcccgaguggagcuacaucguggagaaggccaaccccgucaacgaccucugcuaccccggggacuucaacgacuacgaggagcugaagcaccugcucucccgcaucaaccacuucgagaagauccagaucaucccgaagagcuccuggagcucccacgaggccagccugggcguguccagcgccugccccuaccagggcaaguccagcuucuuccggaacguggucuggcugaucaagaagaacuccaccuaccccacgaucaagcgcagcuacaacaacaccaaccaggaggaccuccuggugcugugggggauccaccaccccaacgacgcggccgagcagaccaagcucuaccagaacccgaccacguacaucuccgugggcaccagcacccugaaccagcggcuggucccccgcaucgccacccgguccaaggugaacgggcagagcggccgcauggaguucuucuggacgauccucaagcccaacgacgccaucaacuucgagagcaacgggaacuucaucgcgcccgaguacgccuacaagaucgugaagaagggcgacuccaccaucaugaagagcgagcuggaguacggcaacugcaacaccaagugccagaccccgaugggggccaucaacuccagcaugcccuuccacaacauccacccccugacgaucggcgagugccccaaguacgucaaguccaaccggcucgugcuggccaccgggcugcgcaacagcccgcagcgggagcggcgccggaagaagcgcggccucuucggcgccaucgcgggguucaucgagggcggguggcagggcaugguggacgggugguacggcuaccaccacuccaacgagcagggcagcggguacgccgccgacaaggaguccacccagaaggccaucgacggcgucacgaacaaggugaacagcaucaucgacaagaugaacacccaguucgaggccguggggcgggaguucaacaaccuggagcgccggaucgagaaccugaacaagaagauggaggacggcuuccucgacgucuggaccuacaacgcggagcugcuggugcucauggagaacgagcgcacccuggacuuccacgacuccaacgucaagaaccuguacgacaaggugcggcuccagcugcgcgacaacgccaaggagcuggggaacggcugcuucgaguucuaccacaagugcgacaacgagugcauggagagcgugcggaacggcacguacgacuacccccaguacuccgaggaggcccgccucaagcgggaggagaucagcggggucaagcuggaguccaucggcaucuaccagauccugagcaucuacuccaccguggccagcucccucgcccuggcgaucaugguggccgggcugagccucuggaugugcagcaacggcucccugcagugccgcaucugcaucugaggacuaguuauaagacugacuagcccgaugggccucccaacgggcccuccuccccuccuugcaccgagauuaauaaaaaaaaaaaaaaaaaaaaaaaaaaaaaaaaaaaaaaaaaaaaaaaaaaaaaaaaaaaaaaaaugcaucccccccccccccccccccccccccccccccaaaggcucuuuucagagccaccagaauu

SEQ ID NO: 224210 - RNA, 2113 nt, Artificial Sequence
  mRNA product Design2 comprising derived and/or modified sequence from hemagglutinin__InfluenzaA__ABP51976/m1 HLA-A2-SP_H5N1(Vietnam2004)-HA (CDS opt1)
ggggcgcugccuacggagguggcagccaucuccuucucggcaucaagcuuaccauggccgugauggccccgcggacccugguccuccugcugagcggcgcgcucgcccugacccagacgugggccgaccagaucugcaucggcuaccacgccaacaacagcaccgagcagguggacaccaucauggagaagaacgucacggugacccacgcgcaggacauccuggagaagacccacaacgggaagcucugcgaccuggacggcgugaagccccugauccuccgggacugcuccgucgccggguggcugcugggcaacccgaugugcgacgaguucaucaacgugcccgaguggagcuacaucguggagaaggccaaccccgucaacgaccucugcuaccccggggacuucaacgacuacgaggagcugaagcaccugcucucccgcaucaaccacuucgagaagauccagaucaucccgaagagcuccuggagcucccacgaggccagccugggcguguccagcgccugccccuaccagggcaaguccagcuucuuccggaacguggucuggcugaucaagaagaacuccaccuaccccacgaucaagcgcagcuacaacaacaccaaccaggaggaccuccuggugcugugggggauccaccaccccaacgacgcggccgagcagaccaagcucuaccagaacccgaccacguacaucuccgugggcaccagcacccugaaccagcggcuggucccccgcaucgccacccgguccaaggugaacgggcagagcggccgcauggaguucuucuggacgauccucaagcccaacgacgccaucaacuucgagagcaacgggaacuucaucgcgcccgaguacgccuacaagaucgugaagaagggcgacuccaccaucaugaagagcgagcuggaguacggcaacugcaacaccaagugccagaccccgaugggggccaucaacuccagcaugcccuuccacaacauccacccccugacgaucggcgagugccccaaguacgucaaguccaaccggcucgugcuggccaccgggcugcgcaacagcccgcagcgggagcggcgccggaagaagcgcggccucuucggcgccaucgcgggguucaucgagggcggguggcagggcaugguggacgggugguacggcuaccaccacuccaacgagcagggcagcggguacgccgccgacaaggaguccacccagaaggccaucgacggcgucacgaacaaggugaacagcaucaucgacaagaugaacacccaguucgaggccguggggcgggaguucaacaaccuggagcgccggaucgagaaccugaacaagaagauggaggacggcuuccucgacgucuggaccuacaacgcggagcugcuggugcucauggagaacgagcgcacccuggacuuccacgacuccaacgucaagaaccuguacgacaaggugcggcuccagcugcgcgacaacgccaaggagcuggggaacggcugcuucgaguucuaccacaagugcgacaacgagugcauggagagcgugcggaacggcacguacgacuacccccaguacuccgaggaggcccgccucaagcgggaggagaucagcggggucaagcuggaguccaucggcaucuaccagauccugagcaucuacuccaccguggccagcucccucgcccuggcgaucaugguggccgggcugagccucuggaugugcagcaacggcucccugcagugccgcaucugcaucugaggacuagugcaucacauuuaaaagcaucucagccuaccaugagaauaagagaaagaaaaugaagaucaauagcuuauucaucucuuuuucuuuuucguugguguaaagccaacacccugucuaaaaaacauaaauuucuuuaaucauuuugccucuuuucucugugcuucaauuaauaaaaaauggaaagaaccuagaucuaaaaaaaaaaaaaaaaaaaaaaaaaaaaaaaaaaaaaaaaaaaaaaaaaaaaaaaaaaaaaaaaugcaucccccccccccccccccccccccccccccccaaaggcucuuuucagagccaccagaauu

SEQ ID NO: 224211 - RNA, 2065 nt, Artificial Sequence
  mRNA product Design2 comprising derived and/or modified sequence from hemagglutinin__InfluenzaA__EPI439507 (CDS opt1) R3217/R3218
ggggcgcugccuacggagguggcagccaucuccuucucggcaucaagcuuaccaugaacacccagauccugguguucgcccucaucgccaucauccccaccaacgcggacaagaucugccugggccaccacgccgucagcaacgggacgaaggugaacacccugaccgagcgcggcguggaggucgugaacgccaccgagacgguggagcggaccaacaucccgcgcaucugcuccaaggggaagcggaccgucgaccucggccagugcgggcugcugggcaccaucacgggcccgccccagugcgaccaguuccucgaguucagcgccgaccugaucaucgagcgccgggagggguccgacgugugcuaccccggcaaguucgugaacgaggaggcccugcgccagauccuccgggagagcgggggcaucgacaaggaggcgaugggguucaccuacuccggcauccgcaccaacggcgccaccagcgccugccggcgcuccgggagcuccuucuacgccgagaugaaguggcugcugagcaacacggacaacgcggccuucccgcagaugaccaaguccuacaagaacacccggaagagccccgcccucaucgucuggggcauccaccacuccgugagcaccgccgagcagacgaagcuguacggguccggcaacaagcuggugaccgucggcagcuccaacuaccagcagagcuucgugcccucccccggggcccgcccgcaggugaacggccucagcgggcggaucgacuuccacuggcugaugcugaaccccaacgacaccgucaccuucagcuucaacggcgcguucaucgcccccgaccgcgccuccuuccuccgggggaagagcaugggcauccaguccggcgugcagguggacgccaacugcgagggggacugcuaccacagcggcgggacgaucaucuccaaccugcccuuccagaacaucgacagccgcgccgucggcaagugcccgcgguacgugaagcagcgcucccugcuccuggcgaccgggaugaagaacgugcccgagauccccaagggccggggccuguucggggccaucgccggcuucaucgagaacgggugggagggccucaucgacgggugguacggcuuccgccaccagaacgcccagggcgaggggaccgccgcggacuacaagagcacccaguccgccaucgaccagaucacgggcaagcugaaccggcugaucgagaagaccaaccagcaguucgagcucaucgacaacgaguucaacgaggucgagaagcagaucgggaacgugaucaacuggacccgcgacagcaucaccgaggugugguccuacaacgccgagcugcuggucgccauggagaaccagcacacgaucgaccucgccgacagcgagauggacaagcuguacgagcgcgugaagcggcagcugcgcgagaacgcggaggaggacggcaccggcugcuucgagaucuuccacaagugcgacgacgacugcauggccuccauccggaacaacaccuacgaccacagcaaguaccgcgaggaggccaugcagaaccggauccagaucgaccccgucaagcucuccagcggguacaaggacgugauccugugguucuccuucggcgccagcugcuucauccugcucgcgaucgugauggggcuggucuucaucugcgugaagaacggcaacaugcgcugcaccaucugcaucugaggacuagugcaucacauuuaaaagcaucucagccuaccaugagaauaagagaaagaaaaugaagaucaauagcuuauucaucucuuuuucuuuuucguugguguaaagccaacacccugucuaaaaaacauaaauuucuuuaaucauuuugccucuuuucucugugcuucaauuaauaaaaaauggaaagaaccuagaucuaaaaaaaaaaaaaaaaaaaaaaaaaaaaaaaaaaaaaaaaaaaaaaaaaaaaaaaaaaaaaaaaugcaucccccccccccccccccccccccccccccccaaaggcucuuuucagagccaccagaauu

SEQ ID NO: 224212 - RNA, 1905 nt, Artificial Sequence
  mRNA product Design4 comprising derived and/or modified sequence from hemagglutinin__InfluenzaA__ABR29595 (CDS opt1) R1072
gggagaaagcuuaccaugaaggccauccugcucgugcugcuguacaccuucaccgccgcgaacgccgacacgcucugcaucggcuaccacgccaacaacagcaccgacaccgucgacaccgugcuggagaagaacgugacggucacccacuccgugaaccugcucgaggaccggcacaacgggaagcugugcaagcugcgcggcguggccccccuccaccuggggaagugcaacaucgccggcuggcugcucgggaacccggagugcgagcugcuguucaccgcgagcuccuggagcuacaucgucgagaccuccaacagcgacaacggcacgugcuaccccggcgacuucaucaacuacgaggagcuccgggagcagcuguccagcguguccagcuucgagcgcuucgagaucuuccccaaggccuccagcuggcccaaccacgagaccaaccggggcgugaccgccgccugcccguacgcgggggccaacuccuucuaccgcaaccugaucuggcucgucaagaaggggaacagcuaccccaagcuguccaagagcuacgugaacaacaaggagaaggaggugcugguccucuggggcauccaccacccgcccaccuccacggaccagcagagccuguaccagaacgccgacgccuacguguucgugggguccagcaaguacaacaagaaguucaagccggagaucgccacccggcccaagguccgcggccaggcgggccggaugaacuacuacuggacccugguggagcccggggacaccaucacguucgaggccaccggcaaccucguggucccccgcuacgccuucgccaugaagcgggggagcggcuccggcaucaucaucagcgacaccccggugcacgacugcaacaccacgugccagacccccaagggggccaucaacaccucccugcccuuccagaacauccaccccgugaccaucggcgagugcccgaaguacgucaagagcacgaagcugcgcauggcgaccgggcuccggaacauccccuccauccagagccgcggccuguucggggccaucgccggcuucaucgagggcggguggaccggcaugaucgacgggugguacggcuaccaccaccagaacgagcagggguccggcuacgccgccgaccggaagagcacccagaacgcgaucgacggcaucacgaacaaggugaacuccgugaucgagaagaugaacacccaguucaccgccgucgggaaggaguucaaccaccuggagaagcgcaucgagaaccucaacaagaagguggacgacggcuuccuggacgucuggaccuacaacgccgagcugcucgugcugcuggagaacgagcggacgcucgacuaccacgacagcaacgugaagaaccuguacgagaagguccgcucccagcugaagaacaacgccaaggagaucgggaacggcugcuucgaguucuaccacaagugcgacgacaccugcauggagagcgugaagaacgggaccuacgacuaccccaaguacuccgaggagagcaagcucaaccgggaggagaucgacggcgugaagcuggaguccacccgcaucuaccagauccuggccaucuacagcacggucgcguccagccucgugcugcuggugucccucggcgccaucagcuucuggaugugcagcaacgggucccugcagugccggaucugcaucugaccacuaguuauaagacugacuagcccgaugggccucccaacgggcccuccuccccuccuugcaccgagauuaauaaaaaaaaaaaaaaaaaaaaaaaaaaaaaaaaaaaaaaaaaaaaaaaaaaaaaaaaaaaaaaaauauuccccccccccccccccccccccccccccccucuagacaauuggaauu

SEQ ID NO: 224213 - RNA, 1918 nt, Artificial Sequence
  mRNA product Design1 comprising derived and/or modified sequence from hemagglutinin__InfluenzaA__ABR29595 (CDS opt1)
gggagaaagcuuaccaugaaggccauccugcucgugcugcuguacaccuucaccgccgcgaacgccgacacgcucugcaucggcuaccacgccaacaacagcaccgacaccgucgacaccgugcuggagaagaacgugacggucacccacuccgugaaccugcucgaggaccggcacaacgggaagcugugcaagcugcgcggcguggccccccuccaccuggggaagugcaacaucgccggcuggcugcucgggaacccggagugcgagcugcuguucaccgcgagcuccuggagcuacaucgucgagaccuccaacagcgacaacggcacgugcuaccccggcgacuucaucaacuacgaggagcuccgggagcagcuguccagcguguccagcuucgagcgcuucgagaucuuccccaaggccuccagcuggcccaaccacgagaccaaccggggcgugaccgccgccugcccguacgcgggggccaacuccuucuaccgcaaccugaucuggcucgucaagaaggggaacagcuaccccaagcuguccaagagcuacgugaacaacaaggagaaggaggugcugguccucuggggcauccaccacccgcccaccuccacggaccagcagagccuguaccagaacgccgacgccuacguguucgugggguccagcaaguacaacaagaaguucaagccggagaucgccacccggcccaagguccgcggccaggcgggccggaugaacuacuacuggacccugguggagcccggggacaccaucacguucgaggccaccggcaaccucguggucccccgcuacgccuucgccaugaagcgggggagcggcuccggcaucaucaucagcgacaccccggugcacgacugcaacaccacgugccagacccccaagggggccaucaacaccucccugcccuuccagaacauccaccccgugaccaucggcgagugcccgaaguacgucaagagcacgaagcugcgcauggcgaccgggcuccggaacauccccuccauccagagccgcggccuguucggggccaucgccggcuucaucgagggcggguggaccggcaugaucgacgggugguacggcuaccaccaccagaacgagcagggguccggcuacgccgccgaccggaagagcacccagaacgcgaucgacggcaucacgaacaaggugaacuccgugaucgagaagaugaacacccaguucaccgccgucgggaaggaguucaaccaccuggagaagcgcaucgagaaccucaacaagaagguggacgacggcuuccuggacgucuggaccuacaacgccgagcugcucgugcugcuggagaacgagcggacgcucgacuaccacgacagcaacgugaagaaccuguacgagaagguccgcucccagcugaagaacaacgccaaggagaucgggaacggcugcuucgaguucuaccacaagugcgacgacaccugcauggagagcgugaagaacgggaccuacgacuaccccaaguacuccgaggagagcaagcucaaccgggaggagaucgacggcgugaagcuggaguccacccgcaucuaccagauccuggccaucuacagcacggucgcguccagccucgugcugcuggugucccucggcgccaucagcuucuggaugugcagcaacgggucccugcagugccggaucugcaucugaccacuaguuauaagacugacuagcccgaugggccucccaacgggcccuccuccccuccuugcaccgagauuaauaaaaaaaaaaaaaaaaaaaaaaaaaaaaaaaaaaaaaaaaaaaaaaaaaaaaaaaaaaaaaaaaugcaucccccccccccccccccccccccccccccccaaaggcucuuuucagagccaccagaauu

SEQ ID NO: 224214 - RNA, 2083 nt, Artificial Sequence
  mRNA product Design2 comprising derived and/or modified sequence from hemagglutinin__InfluenzaA__ABR29595 (CDS opt1)
ggggcgcugccuacggagguggcagccaucuccuucucggcaucaagcuuaccaugaaggccauccugcucgugcugcuguacaccuucaccgccgcgaacgccgacacgcucugcaucggcuaccacgccaacaacagcaccgacaccgucgacaccgugcuggagaagaacgugacggucacccacuccgugaaccugcucgaggaccggcacaacgggaagcugugcaagcugcgcggcguggccccccuccaccuggggaagugcaacaucgccggcuggcugcucgggaacccggagugcgagcugcuguucaccgcgagcuccuggagcuacaucgucgagaccuccaacagcgacaacggcacgugcuaccccggcgacuucaucaacuacgaggagcuccgggagcagcuguccagcguguccagcuucgagcgcuucgagaucuuccccaaggccuccagcuggcccaaccacgagaccaaccggggcgugaccgccgccugcccguacgcgggggccaacuccuucuaccgcaaccugaucuggcucgucaagaaggggaacagcuaccccaagcuguccaagagcuacgugaacaacaaggagaaggaggugcugguccucuggggcauccaccacccgcccaccuccacggaccagcagagccuguaccagaacgccgacgccuacguguucgugggguccagcaaguacaacaagaaguucaagccggagaucgccacccggcccaagguccgcggccaggcgggccggaugaacuacuacuggacccugguggagcccggggacaccaucacguucgaggccaccggcaaccucguggucccccgcuacgccuucgccaugaagcgggggagcggcuccggcaucaucaucagcgacaccccggugcacgacugcaacaccacgugccagacccccaagggggccaucaacaccucccugcccuuccagaacauccaccccgugaccaucggcgagugcccgaaguacgucaagagcacgaagcugcgcauggcgaccgggcuccggaacauccccuccauccagagccgcggccuguucggggccaucgccggcuucaucgagggcggguggaccggcaugaucgacgggugguacggcuaccaccaccagaacgagcagggguccggcuacgccgccgaccggaagagcacccagaacgcgaucgacggcaucacgaacaaggugaacuccgugaucgagaagaugaacacccaguucaccgccgucgggaaggaguucaaccaccuggagaagcgcaucgagaaccucaacaagaagguggacgacggcuuccuggacgucuggaccuacaacgccgagcugcucgugcugcuggagaacgagcggacgcucgacuaccacgacagcaacgugaagaaccuguacgagaagguccgcucccagcugaagaacaacgccaaggagaucgggaacggcugcuucgaguucuaccacaagugcgacgacaccugcauggagagcgugaagaacgggaccuacgacuaccccaaguacuccgaggagagcaagcucaaccgggaggagaucgacggcgugaagcuggaguccacccgcaucuaccagauccuggccaucuacagcacggucgcguccagccucgugcugcuggugucccucggcgccaucagcuucuggaugugcagcaacgggucccugcagugccggaucugcaucugaccacuagugcaucacauuuaaaagcaucucagccuaccaugagaauaagagaaagaaaaugaagaucaauagcuuauucaucucuuuuucuuuuucguugguguaaagccaacacccugucuaaaaaacauaaauuucuuuaaucauuuugccucuuuucucugugcuucaauuaauaaaaaauggaaagaaccuagaucuaaaaaaaaaaaaaaaaaaaaaaaaaaaaaaaaaaaaaaaaaaaaaaaaaaaaaaaaaaaaaaaaugcaucccccccccccccccccccccccccccccccaaaggcucuuuucagagccaccagaauu

SEQ ID NO: 224215 - RNA, 1902 nt, Artificial Sequence
  mRNA product Design4 comprising derived and/or modified sequence from hemagglutinin__InfluenzaA__ABO21709 (CDS opt1) R805/R1010
gggagaaagcuuaccaugaaggccaaccugcucgugcugcugugcgcccucgcggccgccgacgccgacaccaucugcaucggcuaccacgccaacaacagcaccgacacggucgacaccgugcuggagaagaacgugaccgucacccacuccgugaaccugcucgaggacagccacaacgggaagcugugccggcugaagggcaucgcgccccuccagcuggggaagugcaacaucgccggcuggcugcucgggaacccggagugcgacccccugcugcccgugcgcuccuggagcuacaucgucgagacgcccaacuccgagaacggcaucugcuacccgggcgacuucaucgacuacgaggagcuccgggagcagcugagcuccgugagcuccuucgagcgcuucgagaucuuccccaaggagagcuccuggcccaaccacaacaccaacggggugaccgccgccugcagccacgagggcaaguccagcuucuaccggaaccugcucuggcugaccgagaaggagggguccuaccccaagcugaagaacagcuacgucaacaagaagggcaaggaggugcucgugcugugggggauccaccacccgcccaacuccaaggagcagcagaaccuguaccagaacgagaacgcguacgucagcguggugacguccaacuacaaccgccgguucacccccgagaucgccgagcgccccaagguccgggaccaggccggccgcaugaacuacuacuggacccuccugaagccgggcgacaccaucaucuucgaggccaacgggaaccugaucgccccgauguacgcguucgcccucagccggggcuucgggagcggcaucaucacguccaacgccagcaugcacgagugcaacaccaagugccagaccccccugggcgccaucaacuccagccugcccuaccagaacauccacccggugaccaucggggagugccccaaguacgugcgcuccgccaagcuccggauggucacgggccugcgcaacaaccccagcauccagucccgggggcuguucggcgcgaucgccggguucaucgagggcggcuggaccgggaugaucgacggcugguacggguaccaccaccagaacgagcagggcagcggguacgccgccgaccagaaguccacccagaacgccaucaacggcaucaccaacaaggugaacacggugaucgagaagaugaacauccaguucaccgcggucggcaaggaguucaacaagcucgagaagcgcauggagaaccugaacaagaagguggacgacggguuccuggacaucuggaccuacaacgccgagcuccuggugcugcucgagaacgagcggacccuggacuuccacgacagcaacgucaagaaccuguacgagaaggugaagucccagcucaagaacaacgccaaggagaucggcaacgggugcuucgaguucuaccacaagugcgacaacgagugcauggagagcguccgcaacggcacguacgacuaccccaaguacuccgaggagagcaagcugaaccgggagaagguggacggggugaagcuggaguccaugggcaucuaccagauccucgccaucuacagcaccgucgccuccagccuggugcugcuggugucccucggcgcgaucagcuucuggaugugcagcaacgggucccugcagugccgcaucugcaucugaccacuaguuauaagacugacuagcccgaugggccucccaacgggcccuccuccccuccuugcaccgagauuaauaaaaaaaaaaaaaaaaaaaaaaaaaaaaaaaaaaaaaaaaaaaaaaaaaaaaaaaaaaaaaaaauauuccccccccccccccccccccccccccccccucuagacaauuggaauu

SEQ ID NO: 224216 - RNA, 1915 nt, Artificial Sequence
  mRNA product Design1 comprising derived and/or modified sequence from hemagglutinin__InfluenzaA__ABO21709 (CDS opt1) R1398/R2552
gggagaaagcuuaccaugaaggccaaccugcucgugcugcugugcgcccucgcggccgccgacgccgacaccaucugcaucggcuaccacgccaacaacagcaccgacacggucgacaccgugcuggagaagaacgugaccgucacccacuccgugaaccugcucgaggacagccacaacgggaagcugugccggcugaagggcaucgcgccccuccagcuggggaagugcaacaucgccggcuggcugcucgggaacccggagugcgacccccugcugcccgugcgcuccuggagcuacaucgucgagacgcccaacuccgagaacggcaucugcuacccgggcgacuucaucgacuacgaggagcuccgggagcagcugagcuccgugagcuccuucgagcgcuucgagaucuuccccaaggagagcuccuggcccaaccacaacaccaacggggugaccgccgccugcagccacgagggcaaguccagcuucuaccggaaccugcucuggcugaccgagaaggagggguccuaccccaagcugaagaacagcuacgucaacaagaagggcaaggaggugcucgugcugugggggauccaccacccgcccaacuccaaggagcagcagaaccuguaccagaacgagaacgcguacgucagcguggugacguccaacuacaaccgccgguucacccccgagaucgccgagcgccccaagguccgggaccaggccggccgcaugaacuacuacuggacccuccugaagccgggcgacaccaucaucuucgaggccaacgggaaccugaucgccccgauguacgcguucgcccucagccggggcuucgggagcggcaucaucacguccaacgccagcaugcacgagugcaacaccaagugccagaccccccugggcgccaucaacuccagccugcccuaccagaacauccacccggugaccaucggggagugccccaaguacgugcgcuccgccaagcuccggauggucacgggccugcgcaacaaccccagcauccagucccgggggcuguucggcgcgaucgccggguucaucgagggcggcuggaccgggaugaucgacggcugguacggguaccaccaccagaacgagcagggcagcggguacgccgccgaccagaaguccacccagaacgccaucaacggcaucaccaacaaggugaacacggugaucgagaagaugaacauccaguucaccgcggucggcaaggaguucaacaagcucgagaagcgcauggagaaccugaacaagaagguggacgacggguuccuggacaucuggaccuacaacgccgagcuccuggugcugcucgagaacgagcggacccuggacuuccacgacagcaacgucaagaaccuguacgagaaggugaagucccagcucaagaacaacgccaaggagaucggcaacgggugcuucgaguucuaccacaagugcgacaacgagugcauggagagcguccgcaacggcacguacgacuaccccaaguacuccgaggagagcaagcugaaccgggagaagguggacggggugaagcuggaguccaugggcaucuaccagauccucgccaucuacagcaccgucgccuccagccuggugcugcuggugucccucggcgcgaucagcuucuggaugugcagcaacgggucccugcagugccgcaucugcaucugaccacuaguuauaagacugacuagcccgaugggccucccaacgggcccuccuccccuccuugcaccgagauuaauaaaaaaaaaaaaaaaaaaaaaaaaaaaaaaaaaaaaaaaaaaaaaaaaaaaaaaaaaaaaaaaaugcaucccccccccccccccccccccccccccccccaaaggcucuuuucagagccaccagaauu

SEQ ID NO: 224217 - RNA, 2080 nt, Artificial Sequence
  mRNA product Design2 comprising derived and/or modified sequence from hemagglutinin__InfluenzaA__ABO21709 (CDS opt1) R2567/R2568
ggggcgcugccuacggagguggcagccaucuccuucucggcaucaagcuuaccaugaaggccaaccugcucgugcugcugugcgcccucgcggccgccgacgccgacaccaucugcaucggcuaccacgccaacaacagcaccgacacggucgacaccgugcuggagaagaacgugaccgucacccacuccgugaaccugcucgaggacagccacaacgggaagcugugccggcugaagggcaucgcgccccuccagcuggggaagugcaacaucgccggcuggcugcucgggaacccggagugcgacccccugcugcccgugcgcuccuggagcuacaucgucgagacgcccaacuccgagaacggcaucugcuacccgggcgacuucaucgacuacgaggagcuccgggagcagcugagcuccgugagcuccuucgagcgcuucgagaucuuccccaaggagagcuccuggcccaaccacaacaccaacggggugaccgccgccugcagccacgagggcaaguccagcuucuaccggaaccugcucuggcugaccgagaaggagggguccuaccccaagcugaagaacagcuacgucaacaagaagggcaaggaggugcucgugcugugggggauccaccacccgcccaacuccaaggagcagcagaaccuguaccagaacgagaacgcguacgucagcguggugacguccaacuacaaccgccgguucacccccgagaucgccgagcgccccaagguccgggaccaggccggccgcaugaacuacuacuggacccuccugaagccgggcgacaccaucaucuucgaggccaacgggaaccugaucgccccgauguacgcguucgcccucagccggggcuucgggagcggcaucaucacguccaacgccagcaugcacgagugcaacaccaagugccagaccccccugggcgccaucaacuccagccugcccuaccagaacauccacccggugaccaucggggagugccccaaguacgugcgcuccgccaagcuccggauggucacgggccugcgcaacaaccccagcauccagucccgggggcuguucggcgcgaucgccggguucaucgagggcggcuggaccgggaugaucgacggcugguacggguaccaccaccagaacgagcagggcagcggguacgccgccgaccagaaguccacccagaacgccaucaacggcaucaccaacaaggugaacacggugaucgagaagaugaacauccaguucaccgcggucggcaaggaguucaacaagcucgagaagcgcauggagaaccugaacaagaagguggacgacggguuccuggacaucuggaccuacaacgccgagcuccuggugcugcucgagaacgagcggacccuggacuuccacgacagcaacgucaagaaccuguacgagaaggugaagucccagcucaagaacaacgccaaggagaucggcaacgggugcuucgaguucuaccacaagugcgacaacgagugcauggagagcguccgcaacggcacguacgacuaccccaaguacuccgaggagagcaagcugaaccgggagaagguggacggggugaagcuggaguccaugggcaucuaccagauccucgccaucuacagcaccgucgccuccagccuggugcugcuggugucccucggcgcgaucagcuucuggaugugcagcaacgggucccugcagugccgcaucugcaucugaccacuagugcaucacauuuaaaagcaucucagccuaccaugagaauaagagaaagaaaaugaagaucaauagcuuauucaucucuuuuucuuuuucguugguguaaagccaacacccugucuaaaaaacauaaauuucuuuaaucauuuugccucuuuucucugugcuucaauuaauaaaaaauggaaagaaccuagaucuaaaaaaaaaaaaaaaaaaaaaaaaaaaaaaaaaaaaaaaaaaaaaaaaaaaaaaaaaaaaaaaaugcaucccccccccccccccccccccccccccccccaaaggcucuuuucagagccaccagaauu

SEQ ID NO: 224218 - RNA, 1906 nt, Artificial Sequence
  mRNA product Design1 comprising derived and/or modified sequence from hemagglutinin__InfluenzaA__ACV49600 (CDS opt1) R1892/R2477
gggagaaagcuuaccauggccaucaucuaccugauccuccuguucaccgccgugcggggcgaccagaucugcaucggguaccacgcgaacaacagcaccgagaaggucgacacgauccuggagcgcaacgugaccgugacccacgccaaggacauccucgagaagacccacaacggcaagcugugcaagcugaacgggaucccgccgcucgagcugggcgacugcuccaucgccggguggcugcucggcaaccccgagugcgaccggcugcugagcguccccgagugguccuacaucauggagaaggagaacccccgcgacggccucugcuacccggggagcuucaacgacuacgaggagcugaagcaccugcucuccagcgugaagcacuucgagaaggugaagauccugcccaaggaccgguggacgcagcacaccaccaccggcgggucccgcgccugcgccgucagcggcaaccccuccuucuuccggaacaugguguggcugacggagaaggggagcaacuaccccguggcgaagggcuccuacaacaacaccagcggcgagcagaugcucaucaucuggggcguccaccacccgaacgacgagaccgagcagcgcacccuguaccagaacguggggacguacguguccgucgggaccagcacccugaacaagcgguccacccccgagaucgccacgcgccccaaggugaacggccagggcgggcggauggaguucagcuggacccuccuggacaugugggacaccaucaacuucgaguccaccggcaaccugaucgcccccgaguacggguucaagaucagcaagcgcggcuccagcgggaucaugaagacggagggcacccucgagaacugcgagaccaagugccagaccccgcugggcgccaucaacacgacccugcccuuccacaacgugcacccccucaccaucggggagugccccaaguacgucaagagcgagaagcuggugcuggcgaccggccuccggaacgugccgcagaucgagucccgcgggcuguucggcgccaucgccggguucaucgagggcggcuggcaggggauggucgacggcugguacggguaccaccacagcaacgaccagggcuccggguacgccgccgacaaggagagcacgcagaaggcguucgacggcaucaccaacaaggugaacuccgugaucgagaagaugaacacccaguucgaggccgucggcaaggaguucagcaaccuggagcggcgccucgagaaccugaacaagaagauggaggacggguuccuggacguguggaccuacaacgccgagcuccuggugcugauggagaacgagcggacgcucgacuuccacgacuccaacgucaagaaccuguacgacaaggugcgcaugcagcugcgggacaacgucaaggagcucggcaacgggugcuucgaguucuaccacaagugcgacgacgagugcaugaacagcgugaagaacggcaccuacgacuaccccaaguacgaggaggaguccaagcugaaccgcaacgagaucaagggcgugaagcugagcuccaugggggucuaccagauccucgccaucuacgccaccguggcgggcagccugucccuggccaucaugauggccgggaucagcuucuggaugugcuccaacggcagccugcagugccggaucugcaucugaggacuaguuauaagacugacuagcccgaugggccucccaacgggcccuccuccccuccuugcaccgagauuaauaaaaaaaaaaaaaaaaaaaaaaaaaaaaaaaaaaaaaaaaaaaaaaaaaaaaaaaaaaaaaaaaugcaucccccccccccccccccccccccccccccccaaaggcucuuuucagagccaccagaauu

SEQ ID NO: 224219 - RNA, 2071 nt, Artificial Sequence
  R5070 mRNA product opt Design2 from Influenza A H2N2 mRNA product Design2 comprising derived and/or modified sequence from hemagglutinin__InfluenzaA__ACV49600 (CDS opt1) R5070
ggggcgcugccuacggagguggcagccaucuccuucucggcaucaagcuuaccauggccaucaucuaccugauccuccuguucaccgccgugcggggcgaccagaucugcaucggguaccacgcgaacaacagcaccgagaaggucgacacgauccuggagcgcaacgugaccgugacccacgccaaggacauccucgagaagacccacaacggcaagcugugcaagcugaacgggaucccgccgcucgagcugggcgacugcuccaucgccggguggcugcucggcaaccccgagugcgaccggcugcugagcguccccgagugguccuacaucauggagaaggagaacccccgcgacggccucugcuacccggggagcuucaacgacuacgaggagcugaagcaccugcucuccagcgugaagcacuucgagaaggugaagauccugcccaaggaccgguggacgcagcacaccaccaccggcgggucccgcgccugcgccgucagcggcaaccccuccuucuuccggaacaugguguggcugacggagaaggggagcaacuaccccguggcgaagggcuccuacaacaacaccagcggcgagcagaugcucaucaucuggggcguccaccacccgaacgacgagaccgagcagcgcacccuguaccagaacguggggacguacguguccgucgggaccagcacccugaacaagcgguccacccccgagaucgccacgcgccccaaggugaacggccagggcgggcggauggaguucagcuggacccuccuggacaugugggacaccaucaacuucgaguccaccggcaaccugaucgcccccgaguacggguucaagaucagcaagcgcggcuccagcgggaucaugaagacggagggcacccucgagaacugcgagaccaagugccagaccccgcugggcgccaucaacacgacccugcccuuccacaacgugcacccccucaccaucggggagugccccaaguacgucaagagcgagaagcuggugcuggcgaccggccuccggaacgugccgcagaucgagucccgcgggcuguucggcgccaucgccggguucaucgagggcggcuggcaggggauggucgacggcugguacggguaccaccacagcaacgaccagggcuccggguacgccgccgacaaggagagcacgcagaaggcguucgacggcaucaccaacaaggugaacuccgugaucgagaagaugaacacccaguucgaggccgucggcaaggaguucagcaaccuggagcggcgccucgagaaccugaacaagaagauggaggacggguuccuggacguguggaccuacaacgccgagcuccuggugcugauggagaacgagcggacgcucgacuuccacgacuccaacgucaagaaccuguacgacaaggugcgcaugcagcugcgggacaacgucaaggagcucggcaacgggugcuucgaguucuaccacaagugcgacgacgagugcaugaacagcgugaagaacggcaccuacgacuaccccaaguacgaggaggaguccaagcugaaccgcaacgagaucaagggcgugaagcugagcuccaugggggucuaccagauccucgccaucuacgccaccguggcgggcagccugucccuggccaucaugauggccgggaucagcuucuggaugugcuccaacggcagccugcagugccggaucugcaucugaggacuagugcaucacauuuaaaagcaucucagccuaccaugagaauaagagaaagaaaaugaagaucaauagcuuauucaucucuuuuucuuuuucguugguguaaagccaacacccugucuaaaaaacauaaauuucuuuaaucauuuugccucuuuucucugugcuucaauuaauaaaaaauggaaagaaccuagaucuaaaaaaaaaaaaaaaaaaaaaaaaaaaaaaaaaaaaaaaaaaaaaaaaaaaaaaaaaaaaaaaaugcaucccccccccccccccccccccccccccccccaaaggcucuuuucagagccaccagaauu

SEQ ID NO: 224220 - RNA, 1905 nt, Artificial Sequence
  mRNA product Design4 comprising derived and/or modified sequence from hemagglutinin__InfluenzaA__AAG01785 (CDS opt1) R1073
gggagaaagcuuaccaugaagaccaucaucgcccugagcuacauccucugccugguguucgcccagaagcugccgggcaacgacaacuccaccgcgacgcucugccuggggcaccacgccgucccgaacggcacccuggugaagaccaucaccaacgaccagaucgaggugacgaacgccaccgagcucguccagagcuccagcaccgggcggaucugcgacuccccccaccgcauccuggacggcaagaacugcacccugaucgacgcccuccugggggacccccacugcgacggcuuccagaacaaggagugggaccuguucaucgagcggagcaaggccuacuccaacugcuaccccuacgacgugccggacuacagcucccuccgcagccugguggcguccagcggcacgcuggaguucaccaacgaggacuucaacuggaccggggucgcccaggacggcggguccuacagcugcaagcgggaguccgugaagagcuucuucucccgccucaacuggcugcacaagcuggaguacaaguaccccgcccucaacgugaccaugcccaacaacgacaaguucgacaagcuguacaucuggggcguccaccaccccagcacggacuccgagcagaccagccuguacgugcaggccaucgggcgggugaccgucagcaccaaguccagccagcagacggugaucccgaacaucggcucccgccccugggugcggggcaucagcucccgcaucagcaucuacuggaccaucgucaagcccggggacauccuccugaucuccagcaccggcaaccugaucgcgccccggggguacuucaagauccgcaacggcaaguccagcaucaugcgguccgacgccccgaucgacaacugcuacagcgagugcaucacccccaacggcuccauccccaacgacaagcccuuccagaacgugaaccgcaucacguacggggccugcccgaaguacgugaagcagaagacccucaagcuggccaccggcaugcggaacguccccgagaagcagacccgcgggaucuucggcgccaucgcgggguucaucgagaacggcugggagggcaugguggacgggugguacggcuuccggcaccagaacagcgaggggacgggccaggccgccgaccugaaguccacccaggccgccaucgaccaggugaacgggaagcucaaccgccugaucgagaagaccaacgagaaguuccaccagaucgagaaggaguucagcgaggucgagggccggauccaggaccuggagaaguacguggaggacaccaagaucgaccucugguccuacaacgcggagcugcugguggcccucgagaaccagcacacgaucgaccugaccgacagcgagaugaacaagcuguucgagaagacccgcaagcagcuccgggagaacgccgaggacaugggcaacgggugcuucaagaucuaccacaagugcgacaacgccugcaucggcuccauccgcaacgggaccuacgaccacgacgucuaccgggacgaggcccugaacaaccgguuccagaucaagggcguggagcugaagagcggguacaaggacuggauccucuggaucagcuucgcgaucuccugcuuccugcugugcgucgugcuccugggcuucaucaugugggccugccagaagggcaacauccgcugcaacaucugcaucugaccacuaguuauaagacugacuagcccgaugggccucccaacgggcccuccuccccuccuugcaccgagauuaauaaaaaaaaaaaaaaaaaaaaaaaaaaaaaaaaaaaaaaaaaaaaaaaaaaaaaaaaaaaaaaaauauuccccccccccccccccccccccccccccccucuagacaauuggaauu

SEQ ID NO: 224221 - RNA, 1918 nt, Artificial Sequence
  mRNA product Design1 comprising derived and/or modified sequence from hemagglutinin__InfluenzaA__AAG01785 (CDS opt1)
gggagaaagcuuaccaugaagaccaucaucgcccugagcuacauccucugccugguguucgcccagaagcugccgggcaacgacaacuccaccgcgacgcucugccuggggcaccacgccgucccgaacggcacccuggugaagaccaucaccaacgaccagaucgaggugacgaacgccaccgagcucguccagagcuccagcaccgggcggaucugcgacuccccccaccgcauccuggacggcaagaacugcacccugaucgacgcccuccugggggacccccacugcgacggcuuccagaacaaggagugggaccuguucaucgagcggagcaaggccuacuccaacugcuaccccuacgacgugccggacuacagcucccuccgcagccugguggcguccagcggcacgcuggaguucaccaacgaggacuucaacuggaccggggucgcccaggacggcggguccuacagcugcaagcgggaguccgugaagagcuucuucucccgccucaacuggcugcacaagcuggaguacaaguaccccgcccucaacgugaccaugcccaacaacgacaaguucgacaagcuguacaucuggggcguccaccaccccagcacggacuccgagcagaccagccuguacgugcaggccaucgggcgggugaccgucagcaccaaguccagccagcagacggugaucccgaacaucggcucccgccccugggugcggggcaucagcucccgcaucagcaucuacuggaccaucgucaagcccggggacauccuccugaucuccagcaccggcaaccugaucgcgccccggggguacuucaagauccgcaacggcaaguccagcaucaugcgguccgacgccccgaucgacaacugcuacagcgagugcaucacccccaacggcuccauccccaacgacaagcccuuccagaacgugaaccgcaucacguacggggccugcccgaaguacgugaagcagaagacccucaagcuggccaccggcaugcggaacguccccgagaagcagacccgcgggaucuucggcgccaucgcgggguucaucgagaacggcugggagggcaugguggacgggugguacggcuuccggcaccagaacagcgaggggacgggccaggccgccgaccugaaguccacccaggccgccaucgaccaggugaacgggaagcucaaccgccugaucgagaagaccaacgagaaguuccaccagaucgagaaggaguucagcgaggucgagggccggauccaggaccuggagaaguacguggaggacaccaagaucgaccucugguccuacaacgcggagcugcugguggcccucgagaaccagcacacgaucgaccugaccgacagcgagaugaacaagcuguucgagaagacccgcaagcagcuccgggagaacgccgaggacaugggcaacgggugcuucaagaucuaccacaagugcgacaacgccugcaucggcuccauccgcaacgggaccuacgaccacgacgucuaccgggacgaggcccugaacaaccgguuccagaucaagggcguggagcugaagagcggguacaaggacuggauccucuggaucagcuucgcgaucuccugcuuccugcugugcgucgugcuccugggcuucaucaugugggccugccagaagggcaacauccgcugcaacaucugcaucugaccacuaguuauaagacugacuagcccgaugggccucccaacgggcccuccuccccuccuugcaccgagauuaauaaaaaaaaaaaaaaaaaaaaaaaaaaaaaaaaaaaaaaaaaaaaaaaaaaaaaaaaaaaaaaaaugcaucccccccccccccccccccccccccccccccaaaggcucuuuucagagccaccagaauu

SEQ ID NO: 224222 - RNA, 2083 nt, Artificial Sequence
  mRNA product Design2 comprising derived and/or modified sequence from hemagglutinin__InfluenzaA__AAG01785 (CDS opt1)
ggggcgcugccuacggagguggcagccaucuccuucucggcaucaagcuuaccaugaagaccaucaucgcccugagcuacauccucugccugguguucgcccagaagcugccgggcaacgacaacuccaccgcgacgcucugccuggggcaccacgccgucccgaacggcacccuggugaagaccaucaccaacgaccagaucgaggugacgaacgccaccgagcucguccagagcuccagcaccgggcggaucugcgacuccccccaccgcauccuggacggcaagaacugcacccugaucgacgcccuccugggggacccccacugcgacggcuuccagaacaaggagugggaccuguucaucgagcggagcaaggccuacuccaacugcuaccccuacgacgugccggacuacagcucccuccgcagccugguggcguccagcggcacgcuggaguucaccaacgaggacuucaacuggaccggggucgcccaggacggcggguccuacagcugcaagcgggaguccgugaagagcuucuucucccgccucaacuggcugcacaagcuggaguacaaguaccccgcccucaacgugaccaugcccaacaacgacaaguucgacaagcuguacaucuggggcguccaccaccccagcacggacuccgagcagaccagccuguacgugcaggccaucgggcgggugaccgucagcaccaaguccagccagcagacggugaucccgaacaucggcucccgccccugggugcggggcaucagcucccgcaucagcaucuacuggaccaucgucaagcccggggacauccuccugaucuccagcaccggcaaccugaucgcgccccggggguacuucaagauccgcaacggcaaguccagcaucaugcgguccgacgccccgaucgacaacugcuacagcgagugcaucacccccaacggcuccauccccaacgacaagcccuuccagaacgugaaccgcaucacguacggggccugcccgaaguacgugaagcagaagacccucaagcuggccaccggcaugcggaacguccccgagaagcagacccgcgggaucuucggcgccaucgcgggguucaucgagaacggcugggagggcaugguggacgggugguacggcuuccggcaccagaacagcgaggggacgggccaggccgccgaccugaaguccacccaggccgccaucgaccaggugaacgggaagcucaaccgccugaucgagaagaccaacgagaaguuccaccagaucgagaaggaguucagcgaggucgagggccggauccaggaccuggagaaguacguggaggacaccaagaucgaccucugguccuacaacgcggagcugcugguggcccucgagaaccagcacacgaucgaccugaccgacagcgagaugaacaagcuguucgagaagacccgcaagcagcuccgggagaacgccgaggacaugggcaacgggugcuucaagaucuaccacaagugcgacaacgccugcaucggcuccauccgcaacgggaccuacgaccacgacgucuaccgggacgaggcccugaacaaccgguuccagaucaagggcguggagcugaagagcggguacaaggacuggauccucuggaucagcuucgcgaucuccugcuuccugcugugcgucgugcuccugggcuucaucaugugggccugccagaagggcaacauccgcugcaacaucugcaucugaccacuagugcaucacauuuaaaagcaucucagccuaccaugagaauaagagaaagaaaaugaagaucaauagcuuauucaucucuuuuucuuuuucguugguguaaagccaacacccugucuaaaaaacauaaauuucuuuaaucauuuugccucuuuucucugugcuucaauuaauaaaaaauggaaagaaccuagaucuaaaaaaaaaaaaaaaaaaaaaaaaaaaaaaaaaaaaaaaaaaaaaaaaaaaaaaaaaaaaaaaaugcaucccccccccccccccccccccccccccccccaaaggcucuuuucagagccaccagaauu

SEQ ID NO: 224223 - RNA, 1718 nt, Artificial Sequence
  mRNA product Design1 comprising derived and/or modified sequence from hemagglutinin__InfluenzaA__EPI377499 (CDS opt1)
gggagaaagcuuaccaugaagaccaucaucgcccugagcuacauccucugccugguguucgcccagaagcugcccggcaacgacaacuccaccgcgacgcucugccuggggcaccacgccgucccgaacggcaccaucgugaagaccaucaccaacgaccgcaucgaggugacgaacgccaccgagcugguccagaacagcuccaucggggagaucugcgacagcccccaccagauccucgacggcgagaacugcacccugaucgacgcccugcucggggacccccagugcgacggcuuccagaacaagaagugggaccuguucguggagcgguccaaggccuacagcaacugcuaccccuacgacgugccggacuacgcgucccugcgcagccucgucgccuccagcggcacccuggaguucaacaacgaguccuucaacuggaacggggugacgcagaacggcaccagcuccgccugcauccggcgcagcaacaacuccuucuucagccggcugaacuggcucacccaccugaacuucaaguaccccgcccugaacgugaccaugcccaacaacgagcaguucgacaagcucuacaucuggggcguccaccaccccgggacggacaaggaccagaucuuccuguacgcgcagccguccgggcgcaucaccgugagcaccaagcggucccagcaggccgugauccccaacaucggcagccgcccccggauccgcaacaucccgagccggaucuccaucuacuggaccaucgucaagcccggcgacauccugcucaucaacagcacggggaaccugaucgccccgcgcggcuacuucaagauccgguccgggaagagcuccaucaugcgcagcgacgcccccaucggcaagugcaaguccgagugcaucacccccaacggcagcaucccgaacgacaagcccuuccagaacgugaaccggaucaccuacggggccugcccccgcuacgugaagcaguccacccugaagcucgcgacgggcaugcggaacguccccgagaagcagacccgcgggaucuucggcgccaucgccggguucaucgagaacggcugggagggcaugguggacgggugguacggcuuccggcaccagaacagcgaggggcgcggccaggccgccgaccugaaguccacccaggcggccaucgaccagaucaacgggaagcugaaccggcucaucggcaagaccaacgagaaguuccaccagaucgagaaggaguucagcgagguggagggccgcauccaggaccuggagaaguacgucgaggacacgaagaucgaccugugguccuacaacgccgagcuccugguggcccuggagaaccagcacaccaucgaccucaccgacagcgagaugaacaagcuguucgagaagaccaagaagcagcugcgcgagaacgccgaggacauggggaacggcugcuucaagaucuaccacaagugcgacaacgcgugcaucggguccauccggaacggcacguacgaccacgacguguaccgcgacgaggcccucaacaaccgguuccagaucaagggggucgagcugaagagcggcuacaaggacuggauccuguggaucuccuucgccaucagcugcuuccuccugugcguggcccugcucggcuucaucaugugggccugccagaaggggaacauccgcugcaacaucugcaucugagg

SEQ ID NO: 224224 - RNA, 2083 nt, Artificial Sequence
  mRNA product Design2 comprising derived and/or modified sequence from hemagglutinin__InfluenzaA__EPI377499 (CDS opt1) R3238/R3239
ggggcgcugccuacggagguggcagccaucuccuucucggcaucaagcuuaccaugaagaccaucaucgcccugagcuacauccucugccugguguucgcccagaagcugcccggcaacgacaacuccaccgcgacgcucugccuggggcaccacgccgucccgaacggcaccaucgugaagaccaucaccaacgaccgcaucgaggugacgaacgccaccgagcugguccagaacagcuccaucggggagaucugcgacagcccccaccagauccucgacggcgagaacugcacccugaucgacgcccugcucggggacccccagugcgacggcuuccagaacaagaagugggaccuguucguggagcgguccaaggccuacagcaacugcuaccccuacgacgugccggacuacgcgucccugcgcagccucgucgccuccagcggcacccuggaguucaacaacgaguccuucaacuggaacggggugacgcagaacggcaccagcuccgccugcauccggcgcagcaacaacuccuucuucagccggcugaacuggcucacccaccugaacuucaaguaccccgcccugaacgugaccaugcccaacaacgagcaguucgacaagcucuacaucuggggcguccaccaccccgggacggacaaggaccagaucuuccuguacgcgcagccguccgggcgcaucaccgugagcaccaagcggucccagcaggccgugauccccaacaucggcagccgcccccggauccgcaacaucccgagccggaucuccaucuacuggaccaucgucaagcccggcgacauccugcucaucaacagcacggggaaccugaucgccccgcgcggcuacuucaagauccgguccgggaagagcuccaucaugcgcagcgacgcccccaucggcaagugcaaguccgagugcaucacccccaacggcagcaucccgaacgacaagcccuuccagaacgugaaccggaucaccuacggggccugcccccgcuacgugaagcaguccacccugaagcucgcgacgggcaugcggaacguccccgagaagcagacccgcgggaucuucggcgccaucgccggguucaucgagaacggcugggagggcaugguggacgggugguacggcuuccggcaccagaacagcgaggggcgcggccaggccgccgaccugaaguccacccaggcggccaucgaccagaucaacgggaagcugaaccggcucaucggcaagaccaacgagaaguuccaccagaucgagaaggaguucagcgagguggagggccgcauccaggaccuggagaaguacgucgaggacacgaagaucgaccugugguccuacaacgccgagcuccugguggcccuggagaaccagcacaccaucgaccucaccgacagcgagaugaacaagcuguucgagaagaccaagaagcagcugcgcgagaacgccgaggacauggggaacggcugcuucaagaucuaccacaagugcgacaacgcgugcaucggguccauccggaacggcacguacgaccacgacguguaccgcgacgaggcccucaacaaccgguuccagaucaagggggucgagcugaagagcggcuacaaggacuggauccuguggaucuccuucgccaucagcugcuuccuccugugcguggcccugcucggcuucaucaugugggccugccagaaggggaacauccgcugcaacaucugcaucugaggacuagugcaucacauuuaaaagcaucucagccuaccaugagaauaagagaaagaaaaugaagaucaauagcuuauucaucucuuuuucuuuuucguugguguaaagccaacacccugucuaaaaaacauaaauuucuuuaaucauuuugccucuuuucucugugcuucaauuaauaaaaaauggaaagaaccuagaucuaaaaaaaaaaaaaaaaaaaaaaaaaaaaaaaaaaaaaaaaaaaaaaaaaaaaaaaaaaaaaaaaugcaucccccccccccccccccccccccccccccccaaaggcucuuuucagagccaccagaauu

SEQ ID NO: 224225 - RNA, 1893 nt, Artificial Sequence
  mRNA product Design3 comprising derived and/or modified sequence from hemagglutinin__InfluenzaA__ACD47234 (CDS opt1) R1427
gggagaaagcuuaccaugaagaccaucaucgcccugagcuacauccucugccugguguucgcccagaagcugcccggcaacgacaacuccaccgcgacgcucugccuggggcaccacgccgucccgaacggcaccaucgugaagaccaucaccaacgaccagaucgaggugacgaacgccaccgagcugguccagagcuccagcaccggggagaucugcgacuccccccaccagauccucgacggcgagaacugcacccugaucgacgcccugcucggggacccccagugcgacggcuuccagaacaagaagugggaccuguucguggagcggagcaaggccuacuccaacugcuaccccuacgacgugccggacuacgcgagccugcgcucccucgucgccagcuccggcacgcuggaguucaacaacgagagcuucaacuggaccggggugacccagaacggcaccuccagcuccugcauccgggggagcaacaacuccuucuucagccgccugaacuggcucacgcaccugaaguucaaguaccccgcccugaacgugaccaugcccaacaacgagaaguucgacaagcucuacaucuggggcguccaccaccccgggaccgacaacgaccagaucuucccguacgcccaggcguccggccggaucaccgugagcacgaagcgcagccagcagaccgugauccccaacaucggcucccggccccgcguccggaacauccccagccgcaucuccaucuacuggaccaucgugaagccgggggacauccugcugaucaacagcaccggcaaccucaucgccccgcggggguacuucaagauccgcuccggcaagagcuccaucaugcggagcgacgcccccaucggcaagugcaacuccgagugcaucacgcccaacgggagcaucccgaacgacaagcccuuccagaacgugaaccgcaucaccuacggcgccugcccccgguacgucaagcagaacacccugaagcuggccaccgggaugcgcaacgugcccgagaagcagacgcggggcaucuucggggcgaucgccggcuucaucgagaacggcugggaggggaugguggacggcugguacggguuccgccaccagaacuccgagggcaucgggcaggccgccgaccucaagagcacccaggccgcgaucgaccagaucaacggcaagcugaaccggcugaucggcaagaccaacgagaaguuccaccagaucgagaaggaguucuccgaggucgaggggcgcauccaggaccucgagaaguacguggaggacaccaagaucgaccuguggagcuacaacgccgagcugcucguggcccuggagaaccagcacacgaucgaccugaccgacuccgagaugaacaagcucuucgagaagaccaagaagcagcugcgggagaacgccgaggacaugggcaacgggugcuucaagaucuaccacaagugcgacaacgccugcaucggcagcauccgcaacgggaccuacgaccacgacgucuaccgggacgaggcgcugaacaaccgguuccagaucaagggcguggagcucaaguccggcuacaaggacuggauccuguggaucagcuucgccaucuccugcuuccugcucugcguggcccugcugggguucaucaugugggccugccagaagggcaacauccgcugcaacaucugcaucugaggacuaguuauaagacugacuagcccgaugggccucccaacgggcccuccuccccuccuugcaccgagauuaauaaaaaaaaaaaaaaaaaaaaaaaaaaaaaaaaaaaaaaaaaaaaaaaaaaaaaaaaaaaaaaaauauuccccccccccccccccccccccccccccccucuag

SEQ ID NO: 224226 - RNA, 1918 nt, Artificial Sequence
  mRNA product Design1 comprising derived and/or modified sequence from hemagglutinin__InfluenzaA__ACD47234 (CDS opt1)
gggagaaagcuuaccaugaagaccaucaucgcccugagcuacauccucugccugguguucgcccagaagcugcccggcaacgacaacuccaccgcgacgcucugccuggggcaccacgccgucccgaacggcaccaucgugaagaccaucaccaacgaccagaucgaggugacgaacgccaccgagcugguccagagcuccagcaccggggagaucugcgacuccccccaccagauccucgacggcgagaacugcacccugaucgacgcccugcucggggacccccagugcgacggcuuccagaacaagaagugggaccuguucguggagcggagcaaggccuacuccaacugcuaccccuacgacgugccggacuacgcgagccugcgcucccucgucgccagcuccggcacgcuggaguucaacaacgagagcuucaacuggaccggggugacccagaacggcaccuccagcuccugcauccgggggagcaacaacuccuucuucagccgccugaacuggcucacgcaccugaaguucaaguaccccgcccugaacgugaccaugcccaacaacgagaaguucgacaagcucuacaucuggggcguccaccaccccgggaccgacaacgaccagaucuucccguacgcccaggcguccggccggaucaccgugagcacgaagcgcagccagcagaccgugauccccaacaucggcucccggccccgcguccggaacauccccagccgcaucuccaucuacuggaccaucgugaagccgggggacauccugcugaucaacagcaccggcaaccucaucgccccgcggggguacuucaagauccgcuccggcaagagcuccaucaugcggagcgacgcccccaucggcaagugcaacuccgagugcaucacgcccaacgggagcaucccgaacgacaagcccuuccagaacgugaaccgcaucaccuacggcgccugcccccgguacgucaagcagaacacccugaagcuggccaccgggaugcgcaacgugcccgagaagcagacgcggggcaucuucggggcgaucgccggcuucaucgagaacggcugggaggggaugguggacggcugguacggguuccgccaccagaacuccgagggcaucgggcaggccgccgaccucaagagcacccaggccgcgaucgaccagaucaacggcaagcugaaccggcugaucggcaagaccaacgagaaguuccaccagaucgagaaggaguucuccgaggucgaggggcgcauccaggaccucgagaaguacguggaggacaccaagaucgaccuguggagcuacaacgccgagcugcucguggcccuggagaaccagcacacgaucgaccugaccgacuccgagaugaacaagcucuucgagaagaccaagaagcagcugcgggagaacgccgaggacaugggcaacgggugcuucaagaucuaccacaagugcgacaacgccugcaucggcagcauccgcaacgggaccuacgaccacgacgucuaccgggacgaggcgcugaacaaccgguuccagaucaagggcguggagcucaaguccggcuacaaggacuggauccuguggaucagcuucgccaucuccugcuuccugcucugcguggcccugcugggguucaucaugugggccugccagaagggcaacauccgcugcaacaucugcaucugaggacuaguuauaagacugacuagcccgaugggccucccaacgggcccuccuccccuccuugcaccgagauuaauaaaaaaaaaaaaaaaaaaaaaaaaaaaaaaaaaaaaaaaaaaaaaaaaaaaaaaaaaaaaaaaaugcaucccccccccccccccccccccccccccccccaaaggcucuuuucagagccaccagaauu

SEQ ID NO: 224227 - RNA, 2083 nt, Artificial Sequence
  mRNA product Design2 comprising derived and/or modified sequence from hemagglutinin__InfluenzaA__ACD47234 (CDS opt1)
ggggcgcugccuacggagguggcagccaucuccuucucggcaucaagcuuaccaugaagaccaucaucgcccugagcuacauccucugccugguguucgcccagaagcugcccggcaacgacaacuccaccgcgacgcucugccuggggcaccacgccgucccgaacggcaccaucgugaagaccaucaccaacgaccagaucgaggugacgaacgccaccgagcugguccagagcuccagcaccggggagaucugcgacuccccccaccagauccucgacggcgagaacugcacccugaucgacgcccugcucggggacccccagugcgacggcuuccagaacaagaagugggaccuguucguggagcggagcaaggccuacuccaacugcuaccccuacgacgugccggacuacgcgagccugcgcucccucgucgccagcuccggcacgcuggaguucaacaacgagagcuucaacuggaccggggugacccagaacggcaccuccagcuccugcauccgggggagcaacaacuccuucuucagccgccugaacuggcucacgcaccugaaguucaaguaccccgcccugaacgugaccaugcccaacaacgagaaguucgacaagcucuacaucuggggcguccaccaccccgggaccgacaacgaccagaucuucccguacgcccaggcguccggccggaucaccgugagcacgaagcgcagccagcagaccgugauccccaacaucggcucccggccccgcguccggaacauccccagccgcaucuccaucuacuggaccaucgugaagccgggggacauccugcugaucaacagcaccggcaaccucaucgccccgcggggguacuucaagauccgcuccggcaagagcuccaucaugcggagcgacgcccccaucggcaagugcaacuccgagugcaucacgcccaacgggagcaucccgaacgacaagcccuuccagaacgugaaccgcaucaccuacggcgccugcccccgguacgucaagcagaacacccugaagcuggccaccgggaugcgcaacgugcccgagaagcagacgcggggcaucuucggggcgaucgccggcuucaucgagaacggcugggaggggaugguggacggcugguacggguuccgccaccagaacuccgagggcaucgggcaggccgccgaccucaagagcacccaggccgcgaucgaccagaucaacggcaagcugaaccggcugaucggcaagaccaacgagaaguuccaccagaucgagaaggaguucuccgaggucgaggggcgcauccaggaccucgagaaguacguggaggacaccaagaucgaccuguggagcuacaacgccgagcugcucguggcccuggagaaccagcacacgaucgaccugaccgacuccgagaugaacaagcucuucgagaagaccaagaagcagcugcgggagaacgccgaggacaugggcaacgggugcuucaagaucuaccacaagugcgacaacgccugcaucggcagcauccgcaacgggaccuacgaccacgacgucuaccgggacgaggcgcugaacaaccgguuccagaucaagggcguggagcucaaguccggcuacaaggacuggauccuguggaucagcuucgccaucuccugcuuccugcucugcguggcccugcugggguucaucaugugggccugccagaagggcaacauccgcugcaacaucugcaucugaggacuagugcaucacauuuaaaagcaucucagccuaccaugagaauaagagaaagaaaaugaagaucaauagcuuauucaucucuuuuucuuuuucguugguguaaagccaacacccugucuaaaaaacauaaauuucuuuaaucauuuugccucuuuucucugugcuucaauuaauaaaaaauggaaagaaccuagaucuaaaaaaaaaaaaaaaaaaaaaaaaaaaaaaaaaaaaaaaaaaaaaaaaaaaaaaaaaaaaaaaaugcaucccccccccccccccccccccccccccccccaaaggcucuuuucagagccaccagaauu

SEQ ID NO: 224228 - RNA, 1911 nt, Artificial Sequence
  mRNA product Design4 comprising derived and/or modified sequence from hemagglutinin__InfluenzaA__ABD95991 (CDS opt1) R887
gggagaaagcuuaccauggagaagaucaugcugcuccuggccaucgugagccuggucaaguccgaccagaucugcaucggcuaccacgccaacaacagcaccgagcagguggacaccaucauggagaagaacgugacggucacccacgcgcaggacauccucgagaagacccacaacgggaagcugugcgaccuggacggcgugaagccccucauccugcgggacugcuccguggccggguggcugcucggcaacccgaugugcgacgaguuccugaacguccccgaguggagcuacaucguggagaagaucaaccccgccaacgaccugugcuaccccgggaacuucaacgacuacgaggagcucaagcaccugcugucccgcaucaaccacuucgagaagauccagaucaucccgaagagcuccuggagcgaccacgaggccuccagcggcguguccagcgccugccccuaccagggccgguccagcuucuuccgcaacgucguguggcucaucaagaaggacaacgcguaccccaccaucaagcgguccuacaacaacacgaaccaggaggaccugcuggugcucugggggauccaccaccccaacgacgccgccgagcagacccgccuguaccagaacccgaccaccuacaucagcgucggcacguccacccugaaccagcggcucgugcccaagaucgccacccgcagcaaggugaacgggcaguccggccggauggaguucuucuggaccauccugaagcccaacgacgcgaucaacuucgagagcaacgggaacuucaucgcccccgagaacgccuacaagaucgucaagaagggcgacagcacgaucaugaaguccgagcuggaguacggcaacugcaacaccaagugccagaccccgaucggggccaucaacagcuccaugcccuuccacaacauccacccccucaccaucggcgagugccccaaguacgugaagagcaaccgccuggugcuggccacggggcuccggaacuccccgcagggcgagcgccggcgcaagaagcggggccuguucggggcgaucgccggcuucaucgagggcggguggcaggggauggucgacggcugguacggcuaccaccacagcaacgagcagggguccggcuacgccgccgacaaggagagcacccagaaggccaucgacggggugaccaacaaggugaacuccaucaucgacaagaugaacacccaguucgaggcggucggccgcgaguucaacaaccuggagcggcgcaucgagaaccucaacaagaagauggaggacggguuccuggacguguggacguacaacgccgagcugcucgugcugauggagaacgagcggacccuggacuuccacgacagcaacgucaagaaccucuacgacaaggugcgccugcagcugcgggacaacgccaaggagcucggcaacggcugcuucgaguucuaccaccgcugcgacaacgagugcauggaguccguccggaacgggaccuacgacuacccccaguacagcgaggaggcccggcugaagcgcgaggagaucuccggcgugaagcuggagagcaucgggaccuaccagauccucuccaucuacagcacgguggccuccagccuggcgcuggccaucauggucgccggccucucccuguggaugugcagcaacgggagccugcagugccggaucugcaucugaccacuaguuauaagacugacuagcccgaugggccucccaacgggcccuccuccccuccuugcaccgagauuaauaaaaaaaaaaaaaaaaaaaaaaaaaaaaaaaaaaaaaaaaaaaaaaaaaaaaaaaaaaaaaaaauauuccccccccccccccccccccccccccccccucuagacaauuggaauu

SEQ ID NO: 224229 - RNA, 1924 nt, Artificial Sequence
  mRNA product Design1 comprising derived and/or modified sequence from hemagglutinin__InfluenzaA__ABD95991 (CDS opt1) R1728
gggagaaagcuuaccauggagaagaucaugcugcuccuggccaucgugagccuggucaaguccgaccagaucugcaucggcuaccacgccaacaacagcaccgagcagguggacaccaucauggagaagaacgugacggucacccacgcgcaggacauccucgagaagacccacaacgggaagcugugcgaccuggacggcgugaagccccucauccugcgggacugcuccguggccggguggcugcucggcaacccgaugugcgacgaguuccugaacguccccgaguggagcuacaucguggagaagaucaaccccgccaacgaccugugcuaccccgggaacuucaacgacuacgaggagcucaagcaccugcugucccgcaucaaccacuucgagaagauccagaucaucccgaagagcuccuggagcgaccacgaggccuccagcggcguguccagcgccugccccuaccagggccgguccagcuucuuccgcaacgucguguggcucaucaagaaggacaacgcguaccccaccaucaagcgguccuacaacaacacgaaccaggaggaccugcuggugcucugggggauccaccaccccaacgacgccgccgagcagacccgccuguaccagaacccgaccaccuacaucagcgucggcacguccacccugaaccagcggcucgugcccaagaucgccacccgcagcaaggugaacgggcaguccggccggauggaguucuucuggaccauccugaagcccaacgacgcgaucaacuucgagagcaacgggaacuucaucgcccccgagaacgccuacaagaucgucaagaagggcgacagcacgaucaugaaguccgagcuggaguacggcaacugcaacaccaagugccagaccccgaucggggccaucaacagcuccaugcccuuccacaacauccacccccucaccaucggcgagugccccaaguacgugaagagcaaccgccuggugcuggccacggggcuccggaacuccccgcagggcgagcgccggcgcaagaagcggggccuguucggggcgaucgccggcuucaucgagggcggguggcaggggauggucgacggcugguacggcuaccaccacagcaacgagcagggguccggcuacgccgccgacaaggagagcacccagaaggccaucgacggggugaccaacaaggugaacuccaucaucgacaagaugaacacccaguucgaggcggucggccgcgaguucaacaaccuggagcggcgcaucgagaaccucaacaagaagauggaggacggguuccuggacguguggacguacaacgccgagcugcucgugcugauggagaacgagcggacccuggacuuccacgacagcaacgucaagaaccucuacgacaaggugcgccugcagcugcgggacaacgccaaggagcucggcaacggcugcuucgaguucuaccaccgcugcgacaacgagugcauggaguccguccggaacgggaccuacgacuacccccaguacagcgaggaggcccggcugaagcgcgaggagaucuccggcgugaagcuggagagcaucgggaccuaccagauccucuccaucuacagcacgguggccuccagccuggcgcuggccaucauggucgccggccucucccuguggaugugcagcaacgggagccugcagugccggaucugcaucugaccacuaguuauaagacugacuagcccgaugggccucccaacgggcccuccuccccuccuugcaccgagauuaauaaaaaaaaaaaaaaaaaaaaaaaaaaaaaaaaaaaaaaaaaaaaaaaaaaaaaaaaaaaaaaaaugcaucccccccccccccccccccccccccccccccaaaggcucuuuucagagccaccagaauu

SEQ ID NO: 224230 - RNA, 2089 nt, Artificial Sequence
  mRNA product Design2 comprising derived and/or modified sequence from hemagglutinin__InfluenzaA__ABD95991 (CDS opt1) R5076
ggggcgcugccuacggagguggcagccaucuccuucucggcaucaagcuuaccauggagaagaucaugcugcuccuggccaucgugagccuggucaaguccgaccagaucugcaucggcuaccacgccaacaacagcaccgagcagguggacaccaucauggagaagaacgugacggucacccacgcgcaggacauccucgagaagacccacaacgggaagcugugcgaccuggacggcgugaagccccucauccugcgggacugcuccguggccggguggcugcucggcaacccgaugugcgacgaguuccugaacguccccgaguggagcuacaucguggagaagaucaaccccgccaacgaccugugcuaccccgggaacuucaacgacuacgaggagcucaagcaccugcugucccgcaucaaccacuucgagaagauccagaucaucccgaagagcuccuggagcgaccacgaggccuccagcggcguguccagcgccugccccuaccagggccgguccagcuucuuccgcaacgucguguggcucaucaagaaggacaacgcguaccccaccaucaagcgguccuacaacaacacgaaccaggaggaccugcuggugcucugggggauccaccaccccaacgacgccgccgagcagacccgccuguaccagaacccgaccaccuacaucagcgucggcacguccacccugaaccagcggcucgugcccaagaucgccacccgcagcaaggugaacgggcaguccggccggauggaguucuucuggaccauccugaagcccaacgacgcgaucaacuucgagagcaacgggaacuucaucgcccccgagaacgccuacaagaucgucaagaagggcgacagcacgaucaugaaguccgagcuggaguacggcaacugcaacaccaagugccagaccccgaucggggccaucaacagcuccaugcccuuccacaacauccacccccucaccaucggcgagugccccaaguacgugaagagcaaccgccuggugcuggccacggggcuccggaacuccccgcagggcgagcgccggcgcaagaagcggggccuguucggggcgaucgccggcuucaucgagggcggguggcaggggauggucgacggcugguacggcuaccaccacagcaacgagcagggguccggcuacgccgccgacaaggagagcacccagaaggccaucgacggggugaccaacaaggugaacuccaucaucgacaagaugaacacccaguucgaggcggucggccgcgaguucaacaaccuggagcggcgcaucgagaaccucaacaagaagauggaggacggguuccuggacguguggacguacaacgccgagcugcucgugcugauggagaacgagcggacccuggacuuccacgacagcaacgucaagaaccucuacgacaaggugcgccugcagcugcgggacaacgccaaggagcucggcaacggcugcuucgaguucuaccaccgcugcgacaacgagugcauggaguccguccggaacgggaccuacgacuacccccaguacagcgaggaggcccggcugaagcgcgaggagaucuccggcgugaagcuggagagcaucgggaccuaccagauccucuccaucuacagcacgguggccuccagccuggcgcuggccaucauggucgccggccucucccuguggaugugcagcaacgggagccugcagugccggaucugcaucugaccacuagugcaucacauuuaaaagcaucucagccuaccaugagaauaagagaaagaaaaugaagaucaauagcuuauucaucucuuuuucuuuuucguugguguaaagccaacacccugucuaaaaaacauaaauuucuuuaaucauuuugccucuuuucucugugcuucaauuaauaaaaaauggaaagaaccuagaucuaaaaaaaaaaaaaaaaaaaaaaaaaaaaaaaaaaaaaaaaaaaaaaaaaaaaaaaaaaaaaaaaugcaucccccccccccccccccccccccccccccccaaaggcucuuuucagagccaccagaauu

SEQ ID NO: 224231 - RNA, 1921 nt, Artificial Sequence
  mRNA product Design1 comprising derived and/or modified sequence from hemagglutinin__InfluenzaA__EPI459855/m1 (CDS opt1) R5223
gggagaaagcuuaccaugaucgccaucguggucaucgccauccuggcgagcgccggcaaguccgacaagaucugcaucggguaccacgccaacaacagcaccacccagguggacacgcuccuggagaagaacgugaccgucacccacuccguggagcugcucgagaaccagaaggagaagcgcuucugcaagaucaugaacaaggccccgcuggaccugaaggacugcaccaucgagggcuggauccucgggaacccgaagugcgaccugcugcucggcgaccagagcugguccuacaucguggagcggcccaacgcccagaacgggaucugcuaccccggcguccugaacgagcuggaggagcucaaggcguucaucggcagcggggagcgcguggagcgguucgagauguuccccaaguccacgugggccggcguggacaccagccgcggggucaccaacgccugcccguccuacaccaucgacagcuccuucuaccggaaccugguguggaucgugaagacggacagcgccaccuaccccgucaucaagggcaccuacaacaacaccgggacgcagcccauccuguacuucuggggcgugcaccacccccucgacaccaccgugcaggacaaccuguacggcuccggggacaaguacguccgcaugggcaccgagagcaugaacuucgcgaaguccccggagaucgccgcccggcccgccgugaacgggcagcgcagccggaucgacuacuacugguccgugcugcgccccggcgagacgcucaacgucgagagcaacggcaaccugaucgcccccugguacgcguacaaguucguguccaccaacaagaagggggccguguucaagagcgaccugccgaucgagaacugcgacgccaccugccagaccaucacgggcguccuccggaccaacaagaccuuccagaacgugagcccccuguggaucggggagugccccaaguacgugaaguccgagagccugcgccucgccaccggccugcggaacgucccccagaucgccacgcgcgggaucuucggcgcgaucgccggcuucaucgagggcggguggaccgggaugaucgacggcugguacggguaccaccacgagaacucccagggcagcggcuacgccgccgaccgggaguccacccagaaggccaucgacgggaucaccaacaaggugaacagcaucaucaacaagaugaacacgcaguucgaggcggucgaccacgaguucuccaaccuggagcgccggaucggcaaccucaacaagcgcauggaggacggguuccuggacguguggaccuacaacgccgagcugcucgugcugcuggagaacgagcggacccucgaccugcacgacgccaacgucaagaaccuguacgagaaggugaagagccagcuccgcgacaacgccaacgaccugggcaacgggugcuucgaguucuggcacaagugcgacaacgagugcauggaguccgugaagaacggcaccuacgacuacccgaaguaccagaaggagagcaagcugaaccggcagggcaucgaguccgucaagcucgagaaccuggggguguaccagauccuggccaucuacagcacgguguccagcucccucguccuggugggccugaucauggcgaucgggcucuggaugugcagcaacggcuccaugcagugccgcaucugcaucugaggacuaguuauaagacugacuagcccgaugggccucccaacgggcccuccuccccuccuugcaccgagauuaauaaaaaaaaaaaaaaaaaaaaaaaaaaaaaaaaaaaaaaaaaaaaaaaaaaaaaaaaaaaaaaaaugcaucccccccccccccccccccccccccccccccaaaggcucuuuucagagccaccagaauu

SEQ ID NO: 224232 - RNA, 2086 nt, Artificial Sequence
  mRNA product Design2 comprising derived and/or modified sequence from hemagglutinin__InfluenzaA__EPI459855/m1 (CDS opt1) R3417/R3418
ggggcgcugccuacggagguggcagccaucuccuucucggcaucaagcuuaccaugaucgccaucguggucaucgccauccuggcgagcgccggcaaguccgacaagaucugcaucggguaccacgccaacaacagcaccacccagguggacacgcuccuggagaagaacgugaccgucacccacuccguggagcugcucgagaaccagaaggagaagcgcuucugcaagaucaugaacaaggccccgcuggaccugaaggacugcaccaucgagggcuggauccucgggaacccgaagugcgaccugcugcucggcgaccagagcugguccuacaucguggagcggcccaacgcccagaacgggaucugcuaccccggcguccugaacgagcuggaggagcucaaggcguucaucggcagcggggagcgcguggagcgguucgagauguuccccaaguccacgugggccggcguggacaccagccgcggggucaccaacgccugcccguccuacaccaucgacagcuccuucuaccggaaccugguguggaucgugaagacggacagcgccaccuaccccgucaucaagggcaccuacaacaacaccgggacgcagcccauccuguacuucuggggcgugcaccacccccucgacaccaccgugcaggacaaccuguacggcuccggggacaaguacguccgcaugggcaccgagagcaugaacuucgcgaaguccccggagaucgccgcccggcccgccgugaacgggcagcgcagccggaucgacuacuacugguccgugcugcgccccggcgagacgcucaacgucgagagcaacggcaaccugaucgcccccugguacgcguacaaguucguguccaccaacaagaagggggccguguucaagagcgaccugccgaucgagaacugcgacgccaccugccagaccaucacgggcguccuccggaccaacaagaccuuccagaacgugagcccccuguggaucggggagugccccaaguacgugaaguccgagagccugcgccucgccaccggccugcggaacgucccccagaucgccacgcgcgggaucuucggcgcgaucgccggcuucaucgagggcggguggaccgggaugaucgacggcugguacggguaccaccacgagaacucccagggcagcggcuacgccgccgaccgggaguccacccagaaggccaucgacgggaucaccaacaaggugaacagcaucaucaacaagaugaacacgcaguucgaggcggucgaccacgaguucuccaaccuggagcgccggaucggcaaccucaacaagcgcauggaggacggguuccuggacguguggaccuacaacgccgagcugcucgugcugcuggagaacgagcggacccucgaccugcacgacgccaacgucaagaaccuguacgagaaggugaagagccagcuccgcgacaacgccaacgaccugggcaacgggugcuucgaguucuggcacaagugcgacaacgagugcauggaguccgugaagaacggcaccuacgacuacccgaaguaccagaaggagagcaagcugaaccggcagggcaucgaguccgucaagcucgagaaccuggggguguaccagauccuggccaucuacagcacgguguccagcucccucguccuggugggccugaucauggcgaucgggcucuggaugugcagcaacggcuccaugcagugccgcaucugcaucugaggacuagugcaucacauuuaaaagcaucucagccuaccaugagaauaagagaaagaaaaugaagaucaauagcuuauucaucucuuuuucuuuuucguugguguaaagccaacacccugucuaaaaaacauaaauuucuuuaaucauuuugccucuuuucucugugcuucaauuaauaaaaaauggaaagaaccuagaucuaaaaaaaaaaaaaaaaaaaaaaaaaaaaaaaaaaaaaaaaaaaaaaaaaaaaaaaaaaaaaaaaugcaucccccccccccccccccccccccccccccccaaaggcucuuuucagagccaccagaauu

SEQ ID NO: 224233 - RNA, 1896 nt, Artificial Sequence
  mRNA product Design4 comprising derived and/or modified sequence from hemagglutinin__InfluenzaA__ACZ36872/m1 (CDS opt1) R1052
gggagaaagcuuaccaugaacacccagauccugguguucgcccucgucgccgugauccacaccaacgcggacaagaucugccugggccaccacgccgugagcaacgggacgaaggucaacacccugaccgagcggggcguggagguggucaacgccaccgagacgguggagcgcaccaacauccccaagaucugcuccaaggggaagcggaccguggaccucggccagugcgggcugcugggcaccaucacgggccagccgcagugcgaccaguuccucgaguucagcgccgaccugaucaucgagcgccgggacgggaacgacgucugcuaccccggcaaguucgugaacggggaggcccugcgccagauccuccggaaguccggcgggaucaacaaggagaccaugggcuucaccuacagcggcauccgcaccaacgggacgaccuccgcgugccggcgcagcggcuccagcuucuacgccgagaugaaguggcugcuguccgacaccgacaacgccgccuucccccagaugaccaagagcuacaagaacacgcggcgcgagcccgcgcucaucgugugggggauccaccacuccggcagcaccaccgagcagaccaagcuguacggcuccgggaacaagcuggucacggugggcagcuccaaguaccagcagagcuucgugccgucccccgagacccggccccaggucaacgggcagagcggccgcaucgacuuccacuggcucauccuggacuccaacgacaccgugaccuucagcuucaacggggccuucaucgcccccgaccgggccagcuuccugaagggcaaguccaugggcauccagagcgacgugcaggucgacgccaacugcgagggggagugcuaccacuccggcgggacgaucaccagcucccucccguuccagaacaucaacagccgcgcggugggcaagugcccccgguacgugaagcaggagucccugcugcucgccaccgggaugaagaacguccccgagcugagcaagaagcgccggaagcgcggccuguucggcgccaucgccggguucaucgagaacggcugggaggggcucguggacggcugguacggguuccggcaccagaacgcccagggcgagggcaccgcggccgacuacaaguccacgcagagcgccaucgaccagaucaccgggaagcugaaccgccugaucgagaagaccaaccagcaguucgagcucaucgacaacgaguucaccgagguggagaagcagaucggcaacgucaucaacuggacgcgggacuccaucaccgagguguggagcuacaacgccgagcugcuggucgccauggagaaccagcacaccaucgaccucgcggacuccgagaugaacaagcuguacgagcgggugcgcaagcagcugcgggagaacgccgaggaggacgggaccggcugcuucgagaucuuccacaagugcgacgacgacugcauggccagcauccgcaacaacacguacgaccacuccaaguaccgggaggaggccaugcagaaccgcauccagaucgaccccgugaagcucagcggcggguacaaggacgucauccugugguucuccuucggcgccagcugcuuccugcuccuggcgaucgccauggggcugguguucaucugcgugaagaacggcaacaugcggugcaccaucugcaucugaccacuaguuauaagacugacuagcccgaugggccucccaacgggcccuccuccccuccuugcaccgagauuaauaaaaaaaaaaaaaaaaaaaaaaaaaaaaaaaaaaaaaaaaaaaaaaaaaaaaaaaaaaaaaaaauauuccccccccccccccccccccccccccccccucuagacaauuggaauu

SEQ ID NO: 224234 - RNA, 1909 nt, Artificial Sequence
  mRNA product Design1 comprising derived and/or modified sequence from hemagglutinin__InfluenzaA__ACZ36872/m1 (CDS opt1) R2191
gggagaaagcuuaccaugaacacccagauccugguguucgcccucgucgccgugauccacaccaacgcggacaagaucugccugggccaccacgccgugagcaacgggacgaaggucaacacccugaccgagcggggcguggagguggucaacgccaccgagacgguggagcgcaccaacauccccaagaucugcuccaaggggaagcggaccguggaccucggccagugcgggcugcugggcaccaucacgggccagccgcagugcgaccaguuccucgaguucagcgccgaccugaucaucgagcgccgggacgggaacgacgucugcuaccccggcaaguucgugaacggggaggcccugcgccagauccuccggaaguccggcgggaucaacaaggagaccaugggcuucaccuacagcggcauccgcaccaacgggacgaccuccgcgugccggcgcagcggcuccagcuucuacgccgagaugaaguggcugcuguccgacaccgacaacgccgccuucccccagaugaccaagagcuacaagaacacgcggcgcgagcccgcgcucaucgugugggggauccaccacuccggcagcaccaccgagcagaccaagcuguacggcuccgggaacaagcuggucacggugggcagcuccaaguaccagcagagcuucgugccgucccccgagacccggccccaggucaacgggcagagcggccgcaucgacuuccacuggcucauccuggacuccaacgacaccgugaccuucagcuucaacggggccuucaucgcccccgaccgggccagcuuccugaagggcaaguccaugggcauccagagcgacgugcaggucgacgccaacugcgagggggagugcuaccacuccggcgggacgaucaccagcucccucccguuccagaacaucaacagccgcgcggugggcaagugcccccgguacgugaagcaggagucccugcugcucgccaccgggaugaagaacguccccgagcugagcaagaagcgccggaagcgcggccuguucggcgccaucgccggguucaucgagaacggcugggaggggcucguggacggcugguacggguuccggcaccagaacgcccagggcgagggcaccgcggccgacuacaaguccacgcagagcgccaucgaccagaucaccgggaagcugaaccgccugaucgagaagaccaaccagcaguucgagcucaucgacaacgaguucaccgagguggagaagcagaucggcaacgucaucaacuggacgcgggacuccaucaccgagguguggagcuacaacgccgagcugcuggucgccauggagaaccagcacaccaucgaccucgcggacuccgagaugaacaagcuguacgagcgggugcgcaagcagcugcgggagaacgccgaggaggacgggaccggcugcuucgagaucuuccacaagugcgacgacgacugcauggccagcauccgcaacaacacguacgaccacuccaaguaccgggaggaggccaugcagaaccgcauccagaucgaccccgugaagcucagcggcggguacaaggacgucauccugugguucuccuucggcgccagcugcuuccugcuccuggcgaucgccauggggcugguguucaucugcgugaagaacggcaacaugcggugcaccaucugcaucugaccacuaguuauaagacugacuagcccgaugggccucccaacgggcccuccuccccuccuugcaccgagauuaauaaaaaaaaaaaaaaaaaaaaaaaaaaaaaaaaaaaaaaaaaaaaaaaaaaaaaaaaaaaaaaaaugcaucccccccccccccccccccccccccccccccaaaggcucuuuucagagccaccagaauu

SEQ ID NO: 224235 - RNA, 2074 nt, Artificial Sequence
  mRNA product Design2 comprising derived and/or modified sequence from hemagglutinin__InfluenzaA__ACZ36872/m1 (CDS opt1) R5077
ggggcgcugccuacggagguggcagccaucuccuucucggcaucaagcuuaccaugaacacccagauccugguguucgcccucgucgccgugauccacaccaacgcggacaagaucugccugggccaccacgccgugagcaacgggacgaaggucaacacccugaccgagcggggcguggagguggucaacgccaccgagacgguggagcgcaccaacauccccaagaucugcuccaaggggaagcggaccguggaccucggccagugcgggcugcugggcaccaucacgggccagccgcagugcgaccaguuccucgaguucagcgccgaccugaucaucgagcgccgggacgggaacgacgucugcuaccccggcaaguucgugaacggggaggcccugcgccagauccuccggaaguccggcgggaucaacaaggagaccaugggcuucaccuacagcggcauccgcaccaacgggacgaccuccgcgugccggcgcagcggcuccagcuucuacgccgagaugaaguggcugcuguccgacaccgacaacgccgccuucccccagaugaccaagagcuacaagaacacgcggcgcgagcccgcgcucaucgugugggggauccaccacuccggcagcaccaccgagcagaccaagcuguacggcuccgggaacaagcuggucacggugggcagcuccaaguaccagcagagcuucgugccgucccccgagacccggccccaggucaacgggcagagcggccgcaucgacuuccacuggcucauccuggacuccaacgacaccgugaccuucagcuucaacggggccuucaucgcccccgaccgggccagcuuccugaagggcaaguccaugggcauccagagcgacgugcaggucgacgccaacugcgagggggagugcuaccacuccggcgggacgaucaccagcucccucccguuccagaacaucaacagccgcgcggugggcaagugcccccgguacgugaagcaggagucccugcugcucgccaccgggaugaagaacguccccgagcugagcaagaagcgccggaagcgcggccuguucggcgccaucgccggguucaucgagaacggcugggaggggcucguggacggcugguacggguuccggcaccagaacgcccagggcgagggcaccgcggccgacuacaaguccacgcagagcgccaucgaccagaucaccgggaagcugaaccgccugaucgagaagaccaaccagcaguucgagcucaucgacaacgaguucaccgagguggagaagcagaucggcaacgucaucaacuggacgcgggacuccaucaccgagguguggagcuacaacgccgagcugcuggucgccauggagaaccagcacaccaucgaccucgcggacuccgagaugaacaagcuguacgagcgggugcgcaagcagcugcgggagaacgccgaggaggacgggaccggcugcuucgagaucuuccacaagugcgacgacgacugcauggccagcauccgcaacaacacguacgaccacuccaaguaccgggaggaggccaugcagaaccgcauccagaucgaccccgugaagcucagcggcggguacaaggacgucauccugugguucuccuucggcgccagcugcuuccugcuccuggcgaucgccauggggcugguguucaucugcgugaagaacggcaacaugcggugcaccaucugcaucugaccacuagugcaucacauuuaaaagcaucucagccuaccaugagaauaagagaaagaaaaugaagaucaauagcuuauucaucucuuuuucuuuuucguugguguaaagccaacacccugucuaaaaaacauaaauuucuuuaaucauuuugccucuuuucucugugcuucaauuaauaaaaaauggaaagaaccuagaucuaaaaaaaaaaaaaaaaaaaaaaaaaaaaaaaaaaaaaaaaaaaaaaaaaaaaaaaaaaaaaaaaugcaucccccccccccccccccccccccccccccccaaaggcucuuuucagagccaccagaauu

SEQ ID NO: 224236 - RNA, 1975 nt, Artificial Sequence
  mRNA product Design1 comprising derived and/or modified sequence from hemagglutinin__InfluenzaB__ACN29380 (CDS opt1) R2361/R2493
gggagaaagcuuaccaugaaggccaucaucgugcugcucauggucgugaccagcaacgccgaccggaucugcaccggcaucacguccagcaacuccccgcacguggucaagaccgcgacccagggggaggugaacgugaccggcgucaucccgcugacgaccacccccaccaagagccacuucgccaaccugaaggggacggagacccgcggcaagcucugccccaagugccugaacugcaccgaccuggacguggcccucgggcggcccaagugcaccggcaagaucccguccgcccgcgugagcauccugcacgagguccggcccgugacguccggcugcuuccccaucaugcacgaccgcaccaagauccggcagcugcccaaccuccugcgcggguacgagcacauccggcugagcacccacaacgugaucaacgccgagaacgcgccgggcgggcccuacaagaucggcaccuccgggagcugccccaacaucacgaacggcaacggcuucuucgccaccauggccugggccguccccaagaacgacaagaacaagaccgcgaccaacccgcucacgaucgaggugcccuacaucugcaccgagggggaggaccagaucaccguguggggcuuccacuccgacaacgagacccagauggccaagcuguacggggacagcaagccccagaaguucacguccagcgccaacggcgucaccacccacuacgugucccagaucggcggguuccccaaccagaccgaggacggcgggcugccgcagagcggccgcaucguggucgacuacauggugcagaaguccgggaagacgggcaccaucaccuaccagcggggcauccuccugccccagaagguguggugcgccagcgggcgcuccaaggucaucaagggcagccugccccucaucggggaggccgacugccugcacgagaaguacggcgggcugaacaagagcaagcccuacuacaccggcgagcacgcgaaggccaucggcaacugcccgaucugggugaagacgccccucaagcuggccaacgggaccaaguaccggccccccgccaagcugcucaaggagcgcggcuucuucggggccaucgcgggcuuccuggagggcgggugggagggcaugaucgccggguggcacggcuacaccucccacggggcccacggcguggccgucgccgcggaccugaagagcacccaggaggccaucaacaagaucacgaagaaccucaacucccugagcgagcuggaggugaagaaccuccagcggcuguccggcgccauggacgagcugcacaacgagauccucgagcuggacgagaaggucgacgaccugcgcgccgacaccaucagcucccagaucgagcucgccgugcugcugagcaacgaggggaucaucaacuccgaggacgagcaccuccuggcgcuggagcggaagcucaagaagaugcugggcccgagcgccguggagaucgggaacggcugcuucgagaccaagcacaagugcaaccagaccugccuggaccgcaucgccgccgggaccuucgacgcgggcgaguucucccuccccacguucgacagccugaacaucaccgccgccucccugaacgacgacggccuggacaaccacaccauccuccuguacuacagcaccgccgccuccagccuggcggucacgcucaugaucgccaucuucgugguguacauggucucccgggacaacgugagcugcuccaucugccugugaggacuaguuauaagacugacuagcccgaugggccucccaacgggcccuccuccccuccuugcaccgagauuaauaaaaaaaaaaaaaaaaaaaaaaaaaaaaaaaaaaaaaaaaaaaaaaaaaaaaaaaaaaaaaaaaugcaucccccccccccccccccccccccccccccccaaaggcucuuuucagagccaccagaauu

SEQ ID NO: 224237 - RNA, 2140 nt, Artificial Sequence
  mRNA product Design2 comprising derived and/or modified sequence from hemagglutinin__InfluenzaB__ACN29380 (CDS opt1) R2565/R2648
ggggcgcugccuacggagguggcagccaucuccuucucggcaucaagcuuaccaugaaggccaucaucgugcugcucauggucgugaccagcaacgccgaccggaucugcaccggcaucacguccagcaacuccccgcacguggucaagaccgcgacccagggggaggugaacgugaccggcgucaucccgcugacgaccacccccaccaagagccacuucgccaaccugaaggggacggagacccgcggcaagcucugccccaagugccugaacugcaccgaccuggacguggcccucgggcggcccaagugcaccggcaagaucccguccgcccgcgugagcauccugcacgagguccggcccgugacguccggcugcuuccccaucaugcacgaccgcaccaagauccggcagcugcccaaccuccugcgcggguacgagcacauccggcugagcacccacaacgugaucaacgccgagaacgcgccgggcgggcccuacaagaucggcaccuccgggagcugccccaacaucacgaacggcaacggcuucuucgccaccauggccugggccguccccaagaacgacaagaacaagaccgcgaccaacccgcucacgaucgaggugcccuacaucugcaccgagggggaggaccagaucaccguguggggcuuccacuccgacaacgagacccagauggccaagcuguacggggacagcaagccccagaaguucacguccagcgccaacggcgucaccacccacuacgugucccagaucggcggguuccccaaccagaccgaggacggcgggcugccgcagagcggccgcaucguggucgacuacauggugcagaaguccgggaagacgggcaccaucaccuaccagcggggcauccuccugccccagaagguguggugcgccagcgggcgcuccaaggucaucaagggcagccugccccucaucggggaggccgacugccugcacgagaaguacggcgggcugaacaagagcaagcccuacuacaccggcgagcacgcgaaggccaucggcaacugcccgaucugggugaagacgccccucaagcuggccaacgggaccaaguaccggccccccgccaagcugcucaaggagcgcggcuucuucggggccaucgcgggcuuccuggagggcgggugggagggcaugaucgccggguggcacggcuacaccucccacggggcccacggcguggccgucgccgcggaccugaagagcacccaggaggccaucaacaagaucacgaagaaccucaacucccugagcgagcuggaggugaagaaccuccagcggcuguccggcgccauggacgagcugcacaacgagauccucgagcuggacgagaaggucgacgaccugcgcgccgacaccaucagcucccagaucgagcucgccgugcugcugagcaacgaggggaucaucaacuccgaggacgagcaccuccuggcgcuggagcggaagcucaagaagaugcugggcccgagcgccguggagaucgggaacggcugcuucgagaccaagcacaagugcaaccagaccugccuggaccgcaucgccgccgggaccuucgacgcgggcgaguucucccuccccacguucgacagccugaacaucaccgccgccucccugaacgacgacggccuggacaaccacaccauccuccuguacuacagcaccgccgccuccagccuggcggucacgcucaugaucgccaucuucgugguguacauggucucccgggacaacgugagcugcuccaucugccugugaggacuagugcaucacauuuaaaagcaucucagccuaccaugagaauaagagaaagaaaaugaagaucaauagcuuauucaucucuuuuucuuuuucguugguguaaagccaacacccugucuaaaaaacauaaauuucuuuaaucauuuugccucuuuucucugugcuucaauuaauaaaaaauggaaagaaccuagaucuaaaaaaaaaaaaaaaaaaaaaaaaaaaaaaaaaaaaaaaaaaaaaaaaaaaaaaaaaaaaaaaaugcaucccccccccccccccccccccccccccccccaaaggcucuuuucagagccaccagaauu

SEQ ID NO: 224238 - RNA, 1984 nt, Artificial Sequence
  mRNA product Design1 comprising derived and/or modified sequence from hemagglutinin__InfluenzaB__ACN29380 HsALB(1-18)_InfluBV(Brisbane2008)-HA (CDS opt1)
gggagaaagcuuaccaugaagugggugaccuucaucagccugcucuuccuguucuccagcgccuacuccgaccggaucugcaccggcaucacguccagcaacuccccgcacguggucaagaccgcgacccagggggaggugaacgugaccggcgucaucccgcugacgaccacccccaccaagagccacuucgccaaccugaaggggacggagacccgcggcaagcucugccccaagugccugaacugcaccgaccuggacguggcccucgggcggcccaagugcaccggcaagaucccguccgcccgcgugagcauccugcacgagguccggcccgugacguccggcugcuuccccaucaugcacgaccgcaccaagauccggcagcugcccaaccuccugcgcggguacgagcacauccggcugagcacccacaacgugaucaacgccgagaacgcgccgggcgggcccuacaagaucggcaccuccgggagcugccccaacaucacgaacggcaacggcuucuucgccaccauggccugggccguccccaagaacgacaagaacaagaccgcgaccaacccgcucacgaucgaggugcccuacaucugcaccgagggggaggaccagaucaccguguggggcuuccacuccgacaacgagacccagauggccaagcuguacggggacagcaagccccagaaguucacguccagcgccaacggcgucaccacccacuacgugucccagaucggcggguuccccaaccagaccgaggacggcgggcugccgcagagcggccgcaucguggucgacuacauggugcagaaguccgggaagacgggcaccaucaccuaccagcggggcauccuccugccccagaagguguggugcgccagcgggcgcuccaaggucaucaagggcagccugccccucaucggggaggccgacugccugcacgagaaguacggcgggcugaacaagagcaagcccuacuacaccggcgagcacgcgaaggccaucggcaacugcccgaucugggugaagacgccccucaagcuggccaacgggaccaaguaccggccccccgccaagcugcucaaggagcgcggcuucuucggggccaucgcgggcuuccuggagggcgggugggagggcaugaucgccggguggcacggcuacaccucccacggggcccacggcguggccgucgccgcggaccugaagagcacccaggaggccaucaacaagaucacgaagaaccucaacucccugagcgagcuggaggugaagaaccuccagcggcuguccggcgccauggacgagcugcacaacgagauccucgagcuggacgagaaggucgacgaccugcgcgccgacaccaucagcucccagaucgagcucgccgugcugcugagcaacgaggggaucaucaacuccgaggacgagcaccuccuggcgcuggagcggaagcucaagaagaugcugggcccgagcgccguggagaucgggaacggcugcuucgagaccaagcacaagugcaaccagaccugccuggaccgcaucgccgccgggaccuucgacgcgggcgaguucucccuccccacguucgacagccugaacaucaccgccgccucccugaacgacgacggccuggacaaccacaccauccuccuguacuacagcaccgccgccuccagccuggcggucacgcucaugaucgccaucuucgugguguacauggucucccgggacaacgugagcugcuccaucugccugugaggacuaguuauaagacugacuagcccgaugggccucccaacgggcccuccuccccuccuugcaccgagauuaauaaaaaaaaaaaaaaaaaaaaaaaaaaaaaaaaaaaaaaaaaaaaaaaaaaaaaaaaaaaaaaaaugcaucccccccccccccccccccccccccccccccaaaggcucuuuucagagccaccagaauu

SEQ ID NO: 224239 - RNA, 2149 nt, Artificial Sequence
  mRNA product Design2 comprising derived and/or modified sequence from hemagglutinin__InfluenzaB__ACN29380 HsALB(1-18)_InfluBV(Brisbane2008)-HA (CDS opt1)
ggggcgcugccuacggagguggcagccaucuccuucucggcaucaagcuuaccaugaagugggugaccuucaucagccugcucuuccuguucuccagcgccuacuccgaccggaucugcaccggcaucacguccagcaacuccccgcacguggucaagaccgcgacccagggggaggugaacgugaccggcgucaucccgcugacgaccacccccaccaagagccacuucgccaaccugaaggggacggagacccgcggcaagcucugccccaagugccugaacugcaccgaccuggacguggcccucgggcggcccaagugcaccggcaagaucccguccgcccgcgugagcauccugcacgagguccggcccgugacguccggcugcuuccccaucaugcacgaccgcaccaagauccggcagcugcccaaccuccugcgcggguacgagcacauccggcugagcacccacaacgugaucaacgccgagaacgcgccgggcgggcccuacaagaucggcaccuccgggagcugccccaacaucacgaacggcaacggcuucuucgccaccauggccugggccguccccaagaacgacaagaacaagaccgcgaccaacccgcucacgaucgaggugcccuacaucugcaccgagggggaggaccagaucaccguguggggcuuccacuccgacaacgagacccagauggccaagcuguacggggacagcaagccccagaaguucacguccagcgccaacggcgucaccacccacuacgugucccagaucggcggguuccccaaccagaccgaggacggcgggcugccgcagagcggccgcaucguggucgacuacauggugcagaaguccgggaagacgggcaccaucaccuaccagcggggcauccuccugccccagaagguguggugcgccagcgggcgcuccaaggucaucaagggcagccugccccucaucggggaggccgacugccugcacgagaaguacggcgggcugaacaagagcaagcccuacuacaccggcgagcacgcgaaggccaucggcaacugcccgaucugggugaagacgccccucaagcuggccaacgggaccaaguaccggccccccgccaagcugcucaaggagcgcggcuucuucggggccaucgcgggcuuccuggagggcgggugggagggcaugaucgccggguggcacggcuacaccucccacggggcccacggcguggccgucgccgcggaccugaagagcacccaggaggccaucaacaagaucacgaagaaccucaacucccugagcgagcuggaggugaagaaccuccagcggcuguccggcgccauggacgagcugcacaacgagauccucgagcuggacgagaaggucgacgaccugcgcgccgacaccaucagcucccagaucgagcucgccgugcugcugagcaacgaggggaucaucaacuccgaggacgagcaccuccuggcgcuggagcggaagcucaagaagaugcugggcccgagcgccguggagaucgggaacggcugcuucgagaccaagcacaagugcaaccagaccugccuggaccgcaucgccgccgggaccuucgacgcgggcgaguucucccuccccacguucgacagccugaacaucaccgccgccucccugaacgacgacggccuggacaaccacaccauccuccuguacuacagcaccgccgccuccagccuggcggucacgcucaugaucgccaucuucgugguguacauggucucccgggacaacgugagcugcuccaucugccugugaggacuagugcaucacauuuaaaagcaucucagccuaccaugagaauaagagaaagaaaaugaagaucaauagcuuauucaucucuuuuucuuuuucguugguguaaagccaacacccugucuaaaaaacauaaauuucuuuaaucauuuugccucuuuucucugugcuucaauuaauaaaaaauggaaagaaccuagaucuaaaaaaaaaaaaaaaaaaaaaaaaaaaaaaaaaaaaaaaaaaaaaaaaaaaaaaaaaaaaaaaaugcaucccccccccccccccccccccccccccccccaaaggcucuuuucagagccaccagaauu

SEQ ID NO: 224240 - RNA, 1984 nt, Artificial Sequence
  mRNA product Design1 comprising derived and/or modified sequence from hemagglutinin__InfluenzaB__ACN29380 IgE-leader_InfluBV(Brisbane2008)-HA (CDS opt1)
gggagaaagcuuaccauggacuggaccuggauccuguuccucguggccgccgcgacccgcguccacagcgaccggaucugcaccggcaucacguccagcaacuccccgcacguggucaagaccgcgacccagggggaggugaacgugaccggcgucaucccgcugacgaccacccccaccaagagccacuucgccaaccugaaggggacggagacccgcggcaagcucugccccaagugccugaacugcaccgaccuggacguggcccucgggcggcccaagugcaccggcaagaucccguccgcccgcgugagcauccugcacgagguccggcccgugacguccggcugcuuccccaucaugcacgaccgcaccaagauccggcagcugcccaaccuccugcgcggguacgagcacauccggcugagcacccacaacgugaucaacgccgagaacgcgccgggcgggcccuacaagaucggcaccuccgggagcugccccaacaucacgaacggcaacggcuucuucgccaccauggccugggccguccccaagaacgacaagaacaagaccgcgaccaacccgcucacgaucgaggugcccuacaucugcaccgagggggaggaccagaucaccguguggggcuuccacuccgacaacgagacccagauggccaagcuguacggggacagcaagccccagaaguucacguccagcgccaacggcgucaccacccacuacgugucccagaucggcggguuccccaaccagaccgaggacggcgggcugccgcagagcggccgcaucguggucgacuacauggugcagaaguccgggaagacgggcaccaucaccuaccagcggggcauccuccugccccagaagguguggugcgccagcgggcgcuccaaggucaucaagggcagccugccccucaucggggaggccgacugccugcacgagaaguacggcgggcugaacaagagcaagcccuacuacaccggcgagcacgcgaaggccaucggcaacugcccgaucugggugaagacgccccucaagcuggccaacgggaccaaguaccggccccccgccaagcugcucaaggagcgcggcuucuucggggccaucgcgggcuuccuggagggcgggugggagggcaugaucgccggguggcacggcuacaccucccacggggcccacggcguggccgucgccgcggaccugaagagcacccaggaggccaucaacaagaucacgaagaaccucaacucccugagcgagcuggaggugaagaaccuccagcggcuguccggcgccauggacgagcugcacaacgagauccucgagcuggacgagaaggucgacgaccugcgcgccgacaccaucagcucccagaucgagcucgccgugcugcugagcaacgaggggaucaucaacuccgaggacgagcaccuccuggcgcuggagcggaagcucaagaagaugcugggcccgagcgccguggagaucgggaacggcugcuucgagaccaagcacaagugcaaccagaccugccuggaccgcaucgccgccgggaccuucgacgcgggcgaguucucccuccccacguucgacagccugaacaucaccgccgccucccugaacgacgacggccuggacaaccacaccauccuccuguacuacagcaccgccgccuccagccuggcggucacgcucaugaucgccaucuucgugguguacauggucucccgggacaacgugagcugcuccaucugccugugaggacuaguuauaagacugacuagcccgaugggccucccaacgggcccuccuccccuccuugcaccgagauuaauaaaaaaaaaaaaaaaaaaaaaaaaaaaaaaaaaaaaaaaaaaaaaaaaaaaaaaaaaaaaaaaaugcaucccccccccccccccccccccccccccccccaaaggcucuuuucagagccaccagaauu

SEQ ID NO: 224241 - RNA, 2149 nt, Artificial Sequence
  mRNA product Design2 comprising derived and/or modified sequence from hemagglutinin__InfluenzaB__ACN29380 IgE-leader_InfluBV(Brisbane2008)-HA (CDS opt1)
ggggcgcugccuacggagguggcagccaucuccuucucggcaucaagcuuaccauggacuggaccuggauccuguuccucguggccgccgcgacccgcguccacagcgaccggaucugcaccggcaucacguccagcaacuccccgcacguggucaagaccgcgacccagggggaggugaacgugaccggcgucaucccgcugacgaccacccccaccaagagccacuucgccaaccugaaggggacggagacccgcggcaagcucugccccaagugccugaacugcaccgaccuggacguggcccucgggcggcccaagugcaccggcaagaucccguccgcccgcgugagcauccugcacgagguccggcccgugacguccggcugcuuccccaucaugcacgaccgcaccaagauccggcagcugcccaaccuccugcgcggguacgagcacauccggcugagcacccacaacgugaucaacgccgagaacgcgccgggcgggcccuacaagaucggcaccuccgggagcugccccaacaucacgaacggcaacggcuucuucgccaccauggccugggccguccccaagaacgacaagaacaagaccgcgaccaacccgcucacgaucgaggugcccuacaucugcaccgagggggaggaccagaucaccguguggggcuuccacuccgacaacgagacccagauggccaagcuguacggggacagcaagccccagaaguucacguccagcgccaacggcgucaccacccacuacgugucccagaucggcggguuccccaaccagaccgaggacggcgggcugccgcagagcggccgcaucguggucgacuacauggugcagaaguccgggaagacgggcaccaucaccuaccagcggggcauccuccugccccagaagguguggugcgccagcgggcgcuccaaggucaucaagggcagccugccccucaucggggaggccgacugccugcacgagaaguacggcgggcugaacaagagcaagcccuacuacaccggcgagcacgcgaaggccaucggcaacugcccgaucugggugaagacgccccucaagcuggccaacgggaccaaguaccggccccccgccaagcugcucaaggagcgcggcuucuucggggccaucgcgggcuuccuggagggcgggugggagggcaugaucgccggguggcacggcuacaccucccacggggcccacggcguggccgucgccgcggaccugaagagcacccaggaggccaucaacaagaucacgaagaaccucaacucccugagcgagcuggaggugaagaaccuccagcggcuguccggcgccauggacgagcugcacaacgagauccucgagcuggacgagaaggucgacgaccugcgcgccgacaccaucagcucccagaucgagcucgccgugcugcugagcaacgaggggaucaucaacuccgaggacgagcaccuccuggcgcuggagcggaagcucaagaagaugcugggcccgagcgccguggagaucgggaacggcugcuucgagaccaagcacaagugcaaccagaccugccuggaccgcaucgccgccgggaccuucgacgcgggcgaguucucccuccccacguucgacagccugaacaucaccgccgccucccugaacgacgacggccuggacaaccacaccauccuccuguacuacagcaccgccgccuccagccuggcggucacgcucaugaucgccaucuucgugguguacauggucucccgggacaacgugagcugcuccaucugccugugaggacuagugcaucacauuuaaaagcaucucagccuaccaugagaauaagagaaagaaaaugaagaucaauagcuuauucaucucuuuuucuuuuucguugguguaaagccaacacccugucuaaaaaacauaaauuucuuuaaucauuuugccucuuuucucugugcuucaauuaauaaaaaauggaaagaaccuagaucuaaaaaaaaaaaaaaaaaaaaaaaaaaaaaaaaaaaaaaaaaaaaaaaaaaaaaaaaaaaaaaaaugcaucccccccccccccccccccccccccccccccaaaggcucuuuucagagccaccagaauu

SEQ ID NO: 224242 - RNA, 2002 nt, Artificial Sequence
  mRNA product Design1 comprising derived and/or modified sequence from hemagglutinin__InfluenzaB__ACN29380 HsCD5(1-24)_InfluBV(Brisbane2008)-HA (CDS opt1)
gggagaaagcuuaccaugcccaugggcagccugcagccgcucgccacccuguaccugcucgggaugcugguggccuccugccugggcgaccggaucugcaccggcaucacguccagcaacuccccgcacguggucaagaccgcgacccagggggaggugaacgugaccggcgucaucccgcugacgaccacccccaccaagagccacuucgccaaccugaaggggacggagacccgcggcaagcucugccccaagugccugaacugcaccgaccuggacguggcccucgggcggcccaagugcaccggcaagaucccguccgcccgcgugagcauccugcacgagguccggcccgugacguccggcugcuuccccaucaugcacgaccgcaccaagauccggcagcugcccaaccuccugcgcggguacgagcacauccggcugagcacccacaacgugaucaacgccgagaacgcgccgggcgggcccuacaagaucggcaccuccgggagcugccccaacaucacgaacggcaacggcuucuucgccaccauggccugggccguccccaagaacgacaagaacaagaccgcgaccaacccgcucacgaucgaggugcccuacaucugcaccgagggggaggaccagaucaccguguggggcuuccacuccgacaacgagacccagauggccaagcuguacggggacagcaagccccagaaguucacguccagcgccaacggcgucaccacccacuacgugucccagaucggcggguuccccaaccagaccgaggacggcgggcugccgcagagcggccgcaucguggucgacuacauggugcagaaguccgggaagacgggcaccaucaccuaccagcggggcauccuccugccccagaagguguggugcgccagcgggcgcuccaaggucaucaagggcagccugccccucaucggggaggccgacugccugcacgagaaguacggcgggcugaacaagagcaagcccuacuacaccggcgagcacgcgaaggccaucggcaacugcccgaucugggugaagacgccccucaagcuggccaacgggaccaaguaccggccccccgccaagcugcucaaggagcgcggcuucuucggggccaucgcgggcuuccuggagggcgggugggagggcaugaucgccggguggcacggcuacaccucccacggggcccacggcguggccgucgccgcggaccugaagagcacccaggaggccaucaacaagaucacgaagaaccucaacucccugagcgagcuggaggugaagaaccuccagcggcuguccggcgccauggacgagcugcacaacgagauccucgagcuggacgagaaggucgacgaccugcgcgccgacaccaucagcucccagaucgagcucgccgugcugcugagcaacgaggggaucaucaacuccgaggacgagcaccuccuggcgcuggagcggaagcucaagaagaugcugggcccgagcgccguggagaucgggaacggcugcuucgagaccaagcacaagugcaaccagaccugccuggaccgcaucgccgccgggaccuucgacgcgggcgaguucucccuccccacguucgacagccugaacaucaccgccgccucccugaacgacgacggccuggacaaccacaccauccuccuguacuacagcaccgccgccuccagccuggcggucacgcucaugaucgccaucuucgugguguacauggucucccgggacaacgugagcugcuccaucugccugugaggacuaguuauaagacugacuagcccgaugggccucccaacgggcccuccuccccuccuugcaccgagauuaauaaaaaaaaaaaaaaaaaaaaaaaaaaaaaaaaaaaaaaaaaaaaaaaaaaaaaaaaaaaaaaaaugcaucccccccccccccccccccccccccccccccaaaggcucuuuucagagccaccagaauu

SEQ ID NO: 224243 - RNA, 2167 nt, Artificial Sequence
  mRNA product Design2 comprising derived and/or modified sequence from hemagglutinin__InfluenzaB__ACN29380 HsCD5(1-24)_InfluBV(Brisbane2008)-HA (CDS opt1)
ggggcgcugccuacggagguggcagccaucuccuucucggcaucaagcuuaccaugcccaugggcagccugcagccgcucgccacccuguaccugcucgggaugcugguggccuccugccugggcgaccggaucugcaccggcaucacguccagcaacuccccgcacguggucaagaccgcgacccagggggaggugaacgugaccggcgucaucccgcugacgaccacccccaccaagagccacuucgccaaccugaaggggacggagacccgcggcaagcucugccccaagugccugaacugcaccgaccuggacguggcccucgggcggcccaagugcaccggcaagaucccguccgcccgcgugagcauccugcacgagguccggcccgugacguccggcugcuuccccaucaugcacgaccgcaccaagauccggcagcugcccaaccuccugcgcggguacgagcacauccggcugagcacccacaacgugaucaacgccgagaacgcgccgggcgggcccuacaagaucggcaccuccgggagcugccccaacaucacgaacggcaacggcuucuucgccaccauggccugggccguccccaagaacgacaagaacaagaccgcgaccaacccgcucacgaucgaggugcccuacaucugcaccgagggggaggaccagaucaccguguggggcuuccacuccgacaacgagacccagauggccaagcuguacggggacagcaagccccagaaguucacguccagcgccaacggcgucaccacccacuacgugucccagaucggcggguuccccaaccagaccgaggacggcgggcugccgcagagcggccgcaucguggucgacuacauggugcagaaguccgggaagacgggcaccaucaccuaccagcggggcauccuccugccccagaagguguggugcgccagcgggcgcuccaaggucaucaagggcagccugccccucaucggggaggccgacugccugcacgagaaguacggcgggcugaacaagagcaagcccuacuacaccggcgagcacgcgaaggccaucggcaacugcccgaucugggugaagacgccccucaagcuggccaacgggaccaaguaccggccccccgccaagcugcucaaggagcgcggcuucuucggggccaucgcgggcuuccuggagggcgggugggagggcaugaucgccggguggcacggcuacaccucccacggggcccacggcguggccgucgccgcggaccugaagagcacccaggaggccaucaacaagaucacgaagaaccucaacucccugagcgagcuggaggugaagaaccuccagcggcuguccggcgccauggacgagcugcacaacgagauccucgagcuggacgagaaggucgacgaccugcgcgccgacaccaucagcucccagaucgagcucgccgugcugcugagcaacgaggggaucaucaacuccgaggacgagcaccuccuggcgcuggagcggaagcucaagaagaugcugggcccgagcgccguggagaucgggaacggcugcuucgagaccaagcacaagugcaaccagaccugccuggaccgcaucgccgccgggaccuucgacgcgggcgaguucucccuccccacguucgacagccugaacaucaccgccgccucccugaacgacgacggccuggacaaccacaccauccuccuguacuacagcaccgccgccuccagccuggcggucacgcucaugaucgccaucuucgugguguacauggucucccgggacaacgugagcugcuccaucugccugugaggacuagugcaucacauuuaaaagcaucucagccuaccaugagaauaagagaaagaaaaugaagaucaauagcuuauucaucucuuuuucuuuuucguugguguaaagccaacacccugucuaaaaaacauaaauuucuuuaaucauuuugccucuuuucucugugcuucaauuaauaaaaaauggaaagaaccuagaucuaaaaaaaaaaaaaaaaaaaaaaaaaaaaaaaaaaaaaaaaaaaaaaaaaaaaaaaaaaaaaaaaugcaucccccccccccccccccccccccccccccccaaaggcucuuuucagagccaccagaauu

SEQ ID NO: 224244 - RNA, 2002 nt, Artificial Sequence
  mRNA product Design1 comprising derived and/or modified sequence from hemagglutinin__InfluenzaB__ACN29380 HLA-A2-SP_InfluBV(Brisbane2008)-HA (CDS opt1)
gggagaaagcuuaccauggccgugauggccccgcggacccugguccuccugcugagcggcgcgcucgcccugacccagacgugggccgaccggaucugcaccggcaucacguccagcaacuccccgcacguggucaagaccgcgacccagggggaggugaacgugaccggcgucaucccgcugacgaccacccccaccaagagccacuucgccaaccugaaggggacggagacccgcggcaagcucugccccaagugccugaacugcaccgaccuggacguggcccucgggcggcccaagugcaccggcaagaucccguccgcccgcgugagcauccugcacgagguccggcccgugacguccggcugcuuccccaucaugcacgaccgcaccaagauccggcagcugcccaaccuccugcgcggguacgagcacauccggcugagcacccacaacgugaucaacgccgagaacgcgccgggcgggcccuacaagaucggcaccuccgggagcugccccaacaucacgaacggcaacggcuucuucgccaccauggccugggccguccccaagaacgacaagaacaagaccgcgaccaacccgcucacgaucgaggugcccuacaucugcaccgagggggaggaccagaucaccguguggggcuuccacuccgacaacgagacccagauggccaagcuguacggggacagcaagccccagaaguucacguccagcgccaacggcgucaccacccacuacgugucccagaucggcggguuccccaaccagaccgaggacggcgggcugccgcagagcggccgcaucguggucgacuacauggugcagaaguccgggaagacgggcaccaucaccuaccagcggggcauccuccugccccagaagguguggugcgccagcgggcgcuccaaggucaucaagggcagccugccccucaucggggaggccgacugccugcacgagaaguacggcgggcugaacaagagcaagcccuacuacaccggcgagcacgcgaaggccaucggcaacugcccgaucugggugaagacgccccucaagcuggccaacgggaccaaguaccggccccccgccaagcugcucaaggagcgcggcuucuucggggccaucgcgggcuuccuggagggcgggugggagggcaugaucgccggguggcacggcuacaccucccacggggcccacggcguggccgucgccgcggaccugaagagcacccaggaggccaucaacaagaucacgaagaaccucaacucccugagcgagcuggaggugaagaaccuccagcggcuguccggcgccauggacgagcugcacaacgagauccucgagcuggacgagaaggucgacgaccugcgcgccgacaccaucagcucccagaucgagcucgccgugcugcugagcaacgaggggaucaucaacuccgaggacgagcaccuccuggcgcuggagcggaagcucaagaagaugcugggcccgagcgccguggagaucgggaacggcugcuucgagaccaagcacaagugcaaccagaccugccuggaccgcaucgccgccgggaccuucgacgcgggcgaguucucccuccccacguucgacagccugaacaucaccgccgccucccugaacgacgacggccuggacaaccacaccauccuccuguacuacagcaccgccgccuccagccuggcggucacgcucaugaucgccaucuucgugguguacauggucucccgggacaacgugagcugcuccaucugccugugaggacuaguuauaagacugacuagcccgaugggccucccaacgggcccuccuccccuccuugcaccgagauuaauaaaaaaaaaaaaaaaaaaaaaaaaaaaaaaaaaaaaaaaaaaaaaaaaaaaaaaaaaaaaaaaaugcaucccccccccccccccccccccccccccccccaaaggcucuuuucagagccaccagaauu

SEQ ID NO: 224245 - RNA, 2167 nt, Artificial Sequence
  mRNA product Design2 comprising derived and/or modified sequence from hemagglutinin__InfluenzaB__ACN29380 HLA-A2-SP_InfluBV(Brisbane2008)-HA (CDS opt1)
ggggcgcugccuacggagguggcagccaucuccuucucggcaucaagcuuaccauggccgugauggccccgcggacccugguccuccugcugagcggcgcgcucgcccugacccagacgugggccgaccggaucugcaccggcaucacguccagcaacuccccgcacguggucaagaccgcgacccagggggaggugaacgugaccggcgucaucccgcugacgaccacccccaccaagagccacuucgccaaccugaaggggacggagacccgcggcaagcucugccccaagugccugaacugcaccgaccuggacguggcccucgggcggcccaagugcaccggcaagaucccguccgcccgcgugagcauccugcacgagguccggcccgugacguccggcugcuuccccaucaugcacgaccgcaccaagauccggcagcugcccaaccuccugcgcggguacgagcacauccggcugagcacccacaacgugaucaacgccgagaacgcgccgggcgggcccuacaagaucggcaccuccgggagcugccccaacaucacgaacggcaacggcuucuucgccaccauggccugggccguccccaagaacgacaagaacaagaccgcgaccaacccgcucacgaucgaggugcccuacaucugcaccgagggggaggaccagaucaccguguggggcuuccacuccgacaacgagacccagauggccaagcuguacggggacagcaagccccagaaguucacguccagcgccaacggcgucaccacccacuacgugucccagaucggcggguuccccaaccagaccgaggacggcgggcugccgcagagcggccgcaucguggucgacuacauggugcagaaguccgggaagacgggcaccaucaccuaccagcggggcauccuccugccccagaagguguggugcgccagcgggcgcuccaaggucaucaagggcagccugccccucaucggggaggccgacugccugcacgagaaguacggcgggcugaacaagagcaagcccuacuacaccggcgagcacgcgaaggccaucggcaacugcccgaucugggugaagacgccccucaagcuggccaacgggaccaaguaccggccccccgccaagcugcucaaggagcgcggcuucuucggggccaucgcgggcuuccuggagggcgggugggagggcaugaucgccggguggcacggcuacaccucccacggggcccacggcguggccgucgccgcggaccugaagagcacccaggaggccaucaacaagaucacgaagaaccucaacucccugagcgagcuggaggugaagaaccuccagcggcuguccggcgccauggacgagcugcacaacgagauccucgagcuggacgagaaggucgacgaccugcgcgccgacaccaucagcucccagaucgagcucgccgugcugcugagcaacgaggggaucaucaacuccgaggacgagcaccuccuggcgcuggagcggaagcucaagaagaugcugggcccgagcgccguggagaucgggaacggcugcuucgagaccaagcacaagugcaaccagaccugccuggaccgcaucgccgccgggaccuucgacgcgggcgaguucucccuccccacguucgacagccugaacaucaccgccgccucccugaacgacgacggccuggacaaccacaccauccuccuguacuacagcaccgccgccuccagccuggcggucacgcucaugaucgccaucuucgugguguacauggucucccgggacaacgugagcugcuccaucugccugugaggacuagugcaucacauuuaaaagcaucucagccuaccaugagaauaagagaaagaaaaugaagaucaauagcuuauucaucucuuuuucuuuuucguugguguaaagccaacacccugucuaaaaaacauaaauuucuuuaaucauuuugccucuuuucucugugcuucaauuaauaaaaaauggaaagaaccuagaucuaaaaaaaaaaaaaaaaaaaaaaaaaaaaaaaaaaaaaaaaaaaaaaaaaaaaaaaaaaaaaaaaugcaucccccccccccccccccccccccccccccccaaaggcucuuuucagagccaccagaauu

SEQ ID NO: 224246 - RNA, 1972 nt, Artificial Sequence
  mRNA product Design1 comprising derived and/or modified sequence from hemagglutinin__InfluenzaB__EPI540671 (CDS opt1) R4904/R5541
gggagaaagcuuaccaugaaggccaucaucgugcugcucauggucgugaccagcaacgccgaccgcaucugcaccggcaucacguccagcaacuccccgcacguggucaagaccgcgacccagggggaggugaacgugaccggcgucaucccccugacgaccacccccaccaagagcuacuucgccaaccugaaggggacgcggacccgcggcaagcucugccccgacugccugaacugcaccgaccuggacguggcccucgggcggcccaugugcgugggcaccacgccguccgccaaggccagcauccugcacgagguccgccccgugaccuccggcugcuuccccaucaugcacgaccggaccaagauccgccagcugcccaaccuccugcggggguacgagaagauccgccugagcacccagaacgugaucgacgcggagaaggccccgggcgggcccuaccggcucggcacguccgggagcugccccaacgccaccuccaagaucggcuucuucgccaccauggcgugggccguccccaaggacaacuacaagaacgccaccaacccgcugacgguggaggugcccuacaucugcaccgagggcgaggaccagaucaccgucuggggguuccacagcgacaacaagacccagaugaagucccuguacggcgacagcaacccccagaaguucacguccagcgccaacggggugaccacccacuacgugucccagaucggcgacuuccccgaccagaccgaggacggcgggcucccgcagagcggccgcaucgucguggacuacaugaugcagaagcccgggaagacgggcaccaucguguaccagcggggcguccugcugccccagaagguguggugcgccuccgggcgcagcaaggugaucaagggcagccucccccugaucggggaggcggacugccugcacgaggaguacggcgggcucaacaaguccaagccguacuacaccggcaagcacgccaaggccaucgggaacugccccaucugggucaagaccccgcugaagcuggccaacggcacgaaguaccggcccccggccaagcuccugaaggagcgcggcuucuucggggcgaucgccggcuuccuggagggcgggugggaggggaugaucgccggcuggcacggcuacaccagccacggggcccacggcguggccgucgcggccgaccucaaguccacccaggaggccaucaacaagaucaccaagaaccugaacagccuguccgagcucgaggugaagaaccugcagcggcugagcggggccauggacgagcuccacaacgagauccuggagcuggacgagaagguggacgaccuccgcgccgacacgaucuccagccagaucgagcuggcgguccugcucuccaacgagggcaucaucaacagcgaggacgagcaccuccuggcccucgagcggaagcugaagaagaugcugggccccuccgccguggacaucgggaacggcugcuucgagaccaagcacaagugcaaccagaccugccucgaccgcaucgccgcggggaccuucaacgccggcgaguucagccugcccaccuucgacucccugaacaucacggccgccagccugaacgacgacgggcucgacaaccacaccauccugcuguacuacuccaccgccgcgagcucccucgccgugacccugaugcuggccaucuucaucgucuacauggugagccgggacaacguguccugcagcaucugccucugaggacuaguuauaagacugacuagcccgaugggccucccaacgggcccuccuccccuccuugcaccgagauuaauaaaaaaaaaaaaaaaaaaaaaaaaaaaaaaaaaaaaaaaaaaaaaaaaaaaaaaaaaaaaaaaaugcaucccccccccccccccccccccccccccccccaaaggcucuuuucagagccaccagaauu

SEQ ID NO: 224247 - RNA, 2137 nt, Artificial Sequence
  mRNA product Design2 comprising derived and/or modified sequence from hemagglutinin__InfluenzaB__EPI540671 (CDS opt1) R5078
ggggcgcugccuacggagguggcagccaucuccuucucggcaucaagcuuaccaugaaggccaucaucgugcugcucauggucgugaccagcaacgccgaccgcaucugcaccggcaucacguccagcaacuccccgcacguggucaagaccgcgacccagggggaggugaacgugaccggcgucaucccccugacgaccacccccaccaagagcuacuucgccaaccugaaggggacgcggacccgcggcaagcucugccccgacugccugaacugcaccgaccuggacguggcccucgggcggcccaugugcgugggcaccacgccguccgccaaggccagcauccugcacgagguccgccccgugaccuccggcugcuuccccaucaugcacgaccggaccaagauccgccagcugcccaaccuccugcggggguacgagaagauccgccugagcacccagaacgugaucgacgcggagaaggccccgggcgggcccuaccggcucggcacguccgggagcugccccaacgccaccuccaagaucggcuucuucgccaccauggcgugggccguccccaaggacaacuacaagaacgccaccaacccgcugacgguggaggugcccuacaucugcaccgagggcgaggaccagaucaccgucuggggguuccacagcgacaacaagacccagaugaagucccuguacggcgacagcaacccccagaaguucacguccagcgccaacggggugaccacccacuacgugucccagaucggcgacuuccccgaccagaccgaggacggcgggcucccgcagagcggccgcaucgucguggacuacaugaugcagaagcccgggaagacgggcaccaucguguaccagcggggcguccugcugccccagaagguguggugcgccuccgggcgcagcaaggugaucaagggcagccucccccugaucggggaggcggacugccugcacgaggaguacggcgggcucaacaaguccaagccguacuacaccggcaagcacgccaaggccaucgggaacugccccaucugggucaagaccccgcugaagcuggccaacggcacgaaguaccggcccccggccaagcuccugaaggagcgcggcuucuucggggcgaucgccggcuuccuggagggcgggugggaggggaugaucgccggcuggcacggcuacaccagccacggggcccacggcguggccgucgcggccgaccucaaguccacccaggaggccaucaacaagaucaccaagaaccugaacagccuguccgagcucgaggugaagaaccugcagcggcugagcggggccauggacgagcuccacaacgagauccuggagcuggacgagaagguggacgaccuccgcgccgacacgaucuccagccagaucgagcuggcgguccugcucuccaacgagggcaucaucaacagcgaggacgagcaccuccuggcccucgagcggaagcugaagaagaugcugggccccuccgccguggacaucgggaacggcugcuucgagaccaagcacaagugcaaccagaccugccucgaccgcaucgccgcggggaccuucaacgccggcgaguucagccugcccaccuucgacucccugaacaucacggccgccagccugaacgacgacgggcucgacaaccacaccauccugcuguacuacuccaccgccgcgagcucccucgccgugacccugaugcuggccaucuucaucgucuacauggugagccgggacaacguguccugcagcaucugccucugaggacuagugcaucacauuuaaaagcaucucagccuaccaugagaauaagagaaagaaaaugaagaucaauagcuuauucaucucuuuuucuuuuucguugguguaaagccaacacccugucuaaaaaacauaaauuucuuuaaucauuuugccucuuuucucugugcuucaauuaauaaaaaauggaaagaaccuagaucuaaaaaaaaaaaaaaaaaaaaaaaaaaaaaaaaaaaaaaaaaaaaaaaaaaaaaaaaaaaaaaaaugcaucccccccccccccccccccccccccccccccaaaggcucuuuucagagccaccagaauu

SEQ ID NO: 224248 - RNA, 1981 nt, Artificial Sequence
  mRNA product Design1 comprising derived and/or modified sequence from hemagglutinin__InfluenzaB__EPI540671 HsALB(1-18)_InfluBV(Phuket-3073-2013)-HA (CDS opt1)
gggagaaagcuuaccaugaagugggugaccuucaucagccugcucuuccuguucuccagcgccuacuccgaccgcaucugcaccggcaucacguccagcaacuccccgcacguggucaagaccgcgacccagggggaggugaacgugaccggcgucaucccccugacgaccacccccaccaagagcuacuucgccaaccugaaggggacgcggacccgcggcaagcucugccccgacugccugaacugcaccgaccuggacguggcccucgggcggcccaugugcgugggcaccacgccguccgccaaggccagcauccugcacgagguccgccccgugaccuccggcugcuuccccaucaugcacgaccggaccaagauccgccagcugcccaaccuccugcggggguacgagaagauccgccugagcacccagaacgugaucgacgcggagaaggccccgggcgggcccuaccggcucggcacguccgggagcugccccaacgccaccuccaagaucggcuucuucgccaccauggcgugggccguccccaaggacaacuacaagaacgccaccaacccgcugacgguggaggugcccuacaucugcaccgagggcgaggaccagaucaccgucuggggguuccacagcgacaacaagacccagaugaagucccuguacggcgacagcaacccccagaaguucacguccagcgccaacggggugaccacccacuacgugucccagaucggcgacuuccccgaccagaccgaggacggcgggcucccgcagagcggccgcaucgucguggacuacaugaugcagaagcccgggaagacgggcaccaucguguaccagcggggcguccugcugccccagaagguguggugcgccuccgggcgcagcaaggugaucaagggcagccucccccugaucggggaggcggacugccugcacgaggaguacggcgggcucaacaaguccaagccguacuacaccggcaagcacgccaaggccaucgggaacugccccaucugggucaagaccccgcugaagcuggccaacggcacgaaguaccggcccccggccaagcuccugaaggagcgcggcuucuucggggcgaucgccggcuuccuggagggcgggugggaggggaugaucgccggcuggcacggcuacaccagccacggggcccacggcguggccgucgcggccgaccucaaguccacccaggaggccaucaacaagaucaccaagaaccugaacagccuguccgagcucgaggugaagaaccugcagcggcugagcggggccauggacgagcuccacaacgagauccuggagcuggacgagaagguggacgaccuccgcgccgacacgaucuccagccagaucgagcuggcgguccugcucuccaacgagggcaucaucaacagcgaggacgagcaccuccuggcccucgagcggaagcugaagaagaugcugggccccuccgccguggacaucgggaacggcugcuucgagaccaagcacaagugcaaccagaccugccucgaccgcaucgccgcggggaccuucaacgccggcgaguucagccugcccaccuucgacucccugaacaucacggccgccagccugaacgacgacgggcucgacaaccacaccauccugcuguacuacuccaccgccgcgagcucccucgccgugacccugaugcuggccaucuucaucgucuacauggugagccgggacaacguguccugcagcaucugccucugaggacuaguuauaagacugacuagcccgaugggccucccaacgggcccuccuccccuccuugcaccgagauuaauaaaaaaaaaaaaaaaaaaaaaaaaaaaaaaaaaaaaaaaaaaaaaaaaaaaaaaaaaaaaaaaaugcaucccccccccccccccccccccccccccccccaaaggcucuuuucagagccaccagaauu

SEQ ID NO: 224249 - RNA, 2146 nt, Artificial Sequence
  mRNA product Design2 comprising derived and/or modified sequence from hemagglutinin__InfluenzaB__EPI540671 HsALB(1-18)_InfluBV(Phuket-3073-2013)-HA (CDS opt1)
ggggcgcugccuacggagguggcagccaucuccuucucggcaucaagcuuaccaugaagugggugaccuucaucagccugcucuuccuguucuccagcgccuacuccgaccgcaucugcaccggcaucacguccagcaacuccccgcacguggucaagaccgcgacccagggggaggugaacgugaccggcgucaucccccugacgaccacccccaccaagagcuacuucgccaaccugaaggggacgcggacccgcggcaagcucugccccgacugccugaacugcaccgaccuggacguggcccucgggcggcccaugugcgugggcaccacgccguccgccaaggccagcauccugcacgagguccgccccgugaccuccggcugcuuccccaucaugcacgaccggaccaagauccgccagcugcccaaccuccugcggggguacgagaagauccgccugagcacccagaacgugaucgacgcggagaaggccccgggcgggcccuaccggcucggcacguccgggagcugccccaacgccaccuccaagaucggcuucuucgccaccauggcgugggccguccccaaggacaacuacaagaacgccaccaacccgcugacgguggaggugcccuacaucugcaccgagggcgaggaccagaucaccgucuggggguuccacagcgacaacaagacccagaugaagucccuguacggcgacagcaacccccagaaguucacguccagcgccaacggggugaccacccacuacgugucccagaucggcgacuuccccgaccagaccgaggacggcgggcucccgcagagcggccgcaucgucguggacuacaugaugcagaagcccgggaagacgggcaccaucguguaccagcggggcguccugcugccccagaagguguggugcgccuccgggcgcagcaaggugaucaagggcagccucccccugaucggggaggcggacugccugcacgaggaguacggcgggcucaacaaguccaagccguacuacaccggcaagcacgccaaggccaucgggaacugccccaucugggucaagaccccgcugaagcuggccaacggcacgaaguaccggcccccggccaagcuccugaaggagcgcggcuucuucggggcgaucgccggcuuccuggagggcgggugggaggggaugaucgccggcuggcacggcuacaccagccacggggcccacggcguggccgucgcggccgaccucaaguccacccaggaggccaucaacaagaucaccaagaaccugaacagccuguccgagcucgaggugaagaaccugcagcggcugagcggggccauggacgagcuccacaacgagauccuggagcuggacgagaagguggacgaccuccgcgccgacacgaucuccagccagaucgagcuggcgguccugcucuccaacgagggcaucaucaacagcgaggacgagcaccuccuggcccucgagcggaagcugaagaagaugcugggccccuccgccguggacaucgggaacggcugcuucgagaccaagcacaagugcaaccagaccugccucgaccgcaucgccgcggggaccuucaacgccggcgaguucagccugcccaccuucgacucccugaacaucacggccgccagccugaacgacgacgggcucgacaaccacaccauccugcuguacuacuccaccgccgcgagcucccucgccgugacccugaugcuggccaucuucaucgucuacauggugagccgggacaacguguccugcagcaucugccucugaggacuagugcaucacauuuaaaagcaucucagccuaccaugagaauaagagaaagaaaaugaagaucaauagcuuauucaucucuuuuucuuuuucguugguguaaagccaacacccugucuaaaaaacauaaauuucuuuaaucauuuugccucuuuucucugugcuucaauuaauaaaaaauggaaagaaccuagaucuaaaaaaaaaaaaaaaaaaaaaaaaaaaaaaaaaaaaaaaaaaaaaaaaaaaaaaaaaaaaaaaaugcaucccccccccccccccccccccccccccccccaaaggcucuuuucagagccaccagaauu

SEQ ID NO: 224250 - RNA, 1981 nt, Artificial Sequence
  mRNA product Design1 comprising derived and/or modified sequence from hemagglutinin__InfluenzaB__EPI540671 IgE-leader_InfluBV(Phuket-3073-2013)-HA (CDS opt1)
gggagaaagcuuaccauggacuggaccuggauccuguuccucguggccgccgcgacccgcguccacagcgaccgcaucugcaccggcaucacguccagcaacuccccgcacguggucaagaccgcgacccagggggaggugaacgugaccggcgucaucccccugacgaccacccccaccaagagcuacuucgccaaccugaaggggacgcggacccgcggcaagcucugccccgacugccugaacugcaccgaccuggacguggcccucgggcggcccaugugcgugggcaccacgccguccgccaaggccagcauccugcacgagguccgccccgugaccuccggcugcuuccccaucaugcacgaccggaccaagauccgccagcugcccaaccuccugcggggguacgagaagauccgccugagcacccagaacgugaucgacgcggagaaggccccgggcgggcccuaccggcucggcacguccgggagcugccccaacgccaccuccaagaucggcuucuucgccaccauggcgugggccguccccaaggacaacuacaagaacgccaccaacccgcugacgguggaggugcccuacaucugcaccgagggcgaggaccagaucaccgucuggggguuccacagcgacaacaagacccagaugaagucccuguacggcgacagcaacccccagaaguucacguccagcgccaacggggugaccacccacuacgugucccagaucggcgacuuccccgaccagaccgaggacggcgggcucccgcagagcggccgcaucgucguggacuacaugaugcagaagcccgggaagacgggcaccaucguguaccagcggggcguccugcugccccagaagguguggugcgccuccgggcgcagcaaggugaucaagggcagccucccccugaucggggaggcggacugccugcacgaggaguacggcgggcucaacaaguccaagccguacuacaccggcaagcacgccaaggccaucgggaacugccccaucugggucaagaccccgcugaagcuggccaacggcacgaaguaccggcccccggccaagcuccugaaggagcgcggcuucuucggggcgaucgccggcuuccuggagggcgggugggaggggaugaucgccggcuggcacggcuacaccagccacggggcccacggcguggccgucgcggccgaccucaaguccacccaggaggccaucaacaagaucaccaagaaccugaacagccuguccgagcucgaggugaagaaccugcagcggcugagcggggccauggacgagcuccacaacgagauccuggagcuggacgagaagguggacgaccuccgcgccgacacgaucuccagccagaucgagcuggcgguccugcucuccaacgagggcaucaucaacagcgaggacgagcaccuccuggcccucgagcggaagcugaagaagaugcugggccccuccgccguggacaucgggaacggcugcuucgagaccaagcacaagugcaaccagaccugccucgaccgcaucgccgcggggaccuucaacgccggcgaguucagccugcccaccuucgacucccugaacaucacggccgccagccugaacgacgacgggcucgacaaccacaccauccugcuguacuacuccaccgccgcgagcucccucgccgugacccugaugcuggccaucuucaucgucuacauggugagccgggacaacguguccugcagcaucugccucugaggacuaguuauaagacugacuagcccgaugggccucccaacgggcccuccuccccuccuugcaccgagauuaauaaaaaaaaaaaaaaaaaaaaaaaaaaaaaaaaaaaaaaaaaaaaaaaaaaaaaaaaaaaaaaaaugcaucccccccccccccccccccccccccccccccaaaggcucuuuucagagccaccagaauu

SEQ ID NO: 224251 - RNA, 2146 nt, Artificial Sequence
  mRNA product Design2 comprising derived and/or modified sequence from hemagglutinin__InfluenzaB__EPI540671 IgE-leader_InfluBV(Phuket-3073-2013)-HA (CDS opt1)
ggggcgcugccuacggagguggcagccaucuccuucucggcaucaagcuuaccauggacuggaccuggauccuguuccucguggccgccgcgacccgcguccacagcgaccgcaucugcaccggcaucacguccagcaacuccccgcacguggucaagaccgcgacccagggggaggugaacgugaccggcgucaucccccugacgaccacccccaccaagagcuacuucgccaaccugaaggggacgcggacccgcggcaagcucugccccgacugccugaacugcaccgaccuggacguggcccucgggcggcccaugugcgugggcaccacgccguccgccaaggccagcauccugcacgagguccgccccgugaccuccggcugcuuccccaucaugcacgaccggaccaagauccgccagcugcccaaccuccugcggggguacgagaagauccgccugagcacccagaacgugaucgacgcggagaaggccccgggcgggcccuaccggcucggcacguccgggagcugccccaacgccaccuccaagaucggcuucuucgccaccauggcgugggccguccccaaggacaacuacaagaacgccaccaacccgcugacgguggaggugcccuacaucugcaccgagggcgaggaccagaucaccgucuggggguuccacagcgacaacaagacccagaugaagucccuguacggcgacagcaacccccagaaguucacguccagcgccaacggggugaccacccacuacgugucccagaucggcgacuuccccgaccagaccgaggacggcgggcucccgcagagcggccgcaucgucguggacuacaugaugcagaagcccgggaagacgggcaccaucguguaccagcggggcguccugcugccccagaagguguggugcgccuccgggcgcagcaaggugaucaagggcagccucccccugaucggggaggcggacugccugcacgaggaguacggcgggcucaacaaguccaagccguacuacaccggcaagcacgccaaggccaucgggaacugccccaucugggucaagaccccgcugaagcuggccaacggcacgaaguaccggcccccggccaagcuccugaaggagcgcggcuucuucggggcgaucgccggcuuccuggagggcgggugggaggggaugaucgccggcuggcacggcuacaccagccacggggcccacggcguggccgucgcggccgaccucaaguccacccaggaggccaucaacaagaucaccaagaaccugaacagccuguccgagcucgaggugaagaaccugcagcggcugagcggggccauggacgagcuccacaacgagauccuggagcuggacgagaagguggacgaccuccgcgccgacacgaucuccagccagaucgagcuggcgguccugcucuccaacgagggcaucaucaacagcgaggacgagcaccuccuggcccucgagcggaagcugaagaagaugcugggccccuccgccguggacaucgggaacggcugcuucgagaccaagcacaagugcaaccagaccugccucgaccgcaucgccgcggggaccuucaacgccggcgaguucagccugcccaccuucgacucccugaacaucacggccgccagccugaacgacgacgggcucgacaaccacaccauccugcuguacuacuccaccgccgcgagcucccucgccgugacccugaugcuggccaucuucaucgucuacauggugagccgggacaacguguccugcagcaucugccucugaggacuagugcaucacauuuaaaagcaucucagccuaccaugagaauaagagaaagaaaaugaagaucaauagcuuauucaucucuuuuucuuuuucguugguguaaagccaacacccugucuaaaaaacauaaauuucuuuaaucauuuugccucuuuucucugugcuucaauuaauaaaaaauggaaagaaccuagaucuaaaaaaaaaaaaaaaaaaaaaaaaaaaaaaaaaaaaaaaaaaaaaaaaaaaaaaaaaaaaaaaaugcaucccccccccccccccccccccccccccccccaaaggcucuuuucagagccaccagaauu

SEQ ID NO: 224252 - RNA, 1999 nt, Artificial Sequence
  mRNA product Design1 comprising derived and/or modified sequence from hemagglutinin__InfluenzaB__EPI540671 HsCD5(1-24)_InfluBV(Phuket-3073-2013)-HA (CDS opt1)
gggagaaagcuuaccaugcccaugggcagccugcagccgcucgccacccuguaccugcucgggaugcugguggccuccugccugggcgaccgcaucugcaccggcaucacguccagcaacuccccgcacguggucaagaccgcgacccagggggaggugaacgugaccggcgucaucccccugacgaccacccccaccaagagcuacuucgccaaccugaaggggacgcggacccgcggcaagcucugccccgacugccugaacugcaccgaccuggacguggcccucgggcggcccaugugcgugggcaccacgccguccgccaaggccagcauccugcacgagguccgccccgugaccuccggcugcuuccccaucaugcacgaccggaccaagauccgccagcugcccaaccuccugcggggguacgagaagauccgccugagcacccagaacgugaucgacgcggagaaggccccgggcgggcccuaccggcucggcacguccgggagcugccccaacgccaccuccaagaucggcuucuucgccaccauggcgugggccguccccaaggacaacuacaagaacgccaccaacccgcugacgguggaggugcccuacaucugcaccgagggcgaggaccagaucaccgucuggggguuccacagcgacaacaagacccagaugaagucccuguacggcgacagcaacccccagaaguucacguccagcgccaacggggugaccacccacuacgugucccagaucggcgacuuccccgaccagaccgaggacggcgggcucccgcagagcggccgcaucgucguggacuacaugaugcagaagcccgggaagacgggcaccaucguguaccagcggggcguccugcugccccagaagguguggugcgccuccgggcgcagcaaggugaucaagggcagccucccccugaucggggaggcggacugccugcacgaggaguacggcgggcucaacaaguccaagccguacuacaccggcaagcacgccaaggccaucgggaacugccccaucugggucaagaccccgcugaagcuggccaacggcacgaaguaccggcccccggccaagcuccugaaggagcgcggcuucuucggggcgaucgccggcuuccuggagggcgggugggaggggaugaucgccggcuggcacggcuacaccagccacggggcccacggcguggccgucgcggccgaccucaaguccacccaggaggccaucaacaagaucaccaagaaccugaacagccuguccgagcucgaggugaagaaccugcagcggcugagcggggccauggacgagcuccacaacgagauccuggagcuggacgagaagguggacgaccuccgcgccgacacgaucuccagccagaucgagcuggcgguccugcucuccaacgagggcaucaucaacagcgaggacgagcaccuccuggcccucgagcggaagcugaagaagaugcugggccccuccgccguggacaucgggaacggcugcuucgagaccaagcacaagugcaaccagaccugccucgaccgcaucgccgcggggaccuucaacgccggcgaguucagccugcccaccuucgacucccugaacaucacggccgccagccugaacgacgacgggcucgacaaccacaccauccugcuguacuacuccaccgccgcgagcucccucgccgugacccugaugcuggccaucuucaucgucuacauggugagccgggacaacguguccugcagcaucugccucugaggacuaguuauaagacugacuagcccgaugggccucccaacgggcccuccuccccuccuugcaccgagauuaauaaaaaaaaaaaaaaaaaaaaaaaaaaaaaaaaaaaaaaaaaaaaaaaaaaaaaaaaaaaaaaaaugcaucccccccccccccccccccccccccccccccaaaggcucuuuucagagccaccagaauu

SEQ ID NO: 224253 - RNA, 2164 nt, Artificial Sequence
  mRNA product Design2 comprising derived and/or modified sequence from hemagglutinin__InfluenzaB__EPI540671 HsCD5(1-24)_InfluBV(Phuket-3073-2013)-HA (CDS opt1)
ggggcgcugccuacggagguggcagccaucuccuucucggcaucaagcuuaccaugcccaugggcagccugcagccgcucgccacccuguaccugcucgggaugcugguggccuccugccugggcgaccgcaucugcaccggcaucacguccagcaacuccccgcacguggucaagaccgcgacccagggggaggugaacgugaccggcgucaucccccugacgaccacccccaccaagagcuacuucgccaaccugaaggggacgcggacccgcggcaagcucugccccgacugccugaacugcaccgaccuggacguggcccucgggcggcccaugugcgugggcaccacgccguccgccaaggccagcauccugcacgagguccgccccgugaccuccggcugcuuccccaucaugcacgaccggaccaagauccgccagcugcccaaccuccugcggggguacgagaagauccgccugagcacccagaacgugaucgacgcggagaaggccccgggcgggcccuaccggcucggcacguccgggagcugccccaacgccaccuccaagaucggcuucuucgccaccauggcgugggccguccccaaggacaacuacaagaacgccaccaacccgcugacgguggaggugcccuacaucugcaccgagggcgaggaccagaucaccgucuggggguuccacagcgacaacaagacccagaugaagucccuguacggcgacagcaacccccagaaguucacguccagcgccaacggggugaccacccacuacgugucccagaucggcgacuuccccgaccagaccgaggacggcgggcucccgcagagcggccgcaucgucguggacuacaugaugcagaagcccgggaagacgggcaccaucguguaccagcggggcguccugcugccccagaagguguggugcgccuccgggcgcagcaaggugaucaagggcagccucccccugaucggggaggcggacugccugcacgaggaguacggcgggcucaacaaguccaagccguacuacaccggcaagcacgccaaggccaucgggaacugccccaucugggucaagaccccgcugaagcuggccaacggcacgaaguaccggcccccggccaagcuccugaaggagcgcggcuucuucggggcgaucgccggcuuccuggagggcgggugggaggggaugaucgccggcuggcacggcuacaccagccacggggcccacggcguggccgucgcggccgaccucaaguccacccaggaggccaucaacaagaucaccaagaaccugaacagccuguccgagcucgaggugaagaaccugcagcggcugagcggggccauggacgagcuccacaacgagauccuggagcuggacgagaagguggacgaccuccgcgccgacacgaucuccagccagaucgagcuggcgguccugcucuccaacgagggcaucaucaacagcgaggacgagcaccuccuggcccucgagcggaagcugaagaagaugcugggccccuccgccguggacaucgggaacggcugcuucgagaccaagcacaagugcaaccagaccugccucgaccgcaucgccgcggggaccuucaacgccggcgaguucagccugcccaccuucgacucccugaacaucacggccgccagccugaacgacgacgggcucgacaaccacaccauccugcuguacuacuccaccgccgcgagcucccucgccgugacccugaugcuggccaucuucaucgucuacauggugagccgggacaacguguccugcagcaucugccucugaggacuagugcaucacauuuaaaagcaucucagccuaccaugagaauaagagaaagaaaaugaagaucaauagcuuauucaucucuuuuucuuuuucguugguguaaagccaacacccugucuaaaaaacauaaauuucuuuaaucauuuugccucuuuucucugugcuucaauuaauaaaaaauggaaagaaccuagaucuaaaaaaaaaaaaaaaaaaaaaaaaaaaaaaaaaaaaaaaaaaaaaaaaaaaaaaaaaaaaaaaaugcaucccccccccccccccccccccccccccccccaaaggcucuuuucagagccaccagaauu

SEQ ID NO: 224254 - RNA, 1999 nt, Artificial Sequence
  mRNA product Design1 comprising derived and/or modified sequence from hemagglutinin__InfluenzaB__EPI540671 HLA-A2-SP_InfluBV(Phuket-3073-2013)-HA (CDS opt1)
gggagaaagcuuaccauggccgugauggccccgcggacccugguccuccugcugagcggcgcgcucgcccugacccagacgugggccgaccgcaucugcaccggcaucacguccagcaacuccccgcacguggucaagaccgcgacccagggggaggugaacgugaccggcgucaucccccugacgaccacccccaccaagagcuacuucgccaaccugaaggggacgcggacccgcggcaagcucugccccgacugccugaacugcaccgaccuggacguggcccucgggcggcccaugugcgugggcaccacgccguccgccaaggccagcauccugcacgagguccgccccgugaccuccggcugcuuccccaucaugcacgaccggaccaagauccgccagcugcccaaccuccugcggggguacgagaagauccgccugagcacccagaacgugaucgacgcggagaaggccccgggcgggcccuaccggcucggcacguccgggagcugccccaacgccaccuccaagaucggcuucuucgccaccauggcgugggccguccccaaggacaacuacaagaacgccaccaacccgcugacgguggaggugcccuacaucugcaccgagggcgaggaccagaucaccgucuggggguuccacagcgacaacaagacccagaugaagucccuguacggcgacagcaacccccagaaguucacguccagcgccaacggggugaccacccacuacgugucccagaucggcgacuuccccgaccagaccgaggacggcgggcucccgcagagcggccgcaucgucguggacuacaugaugcagaagcccgggaagacgggcaccaucguguaccagcggggcguccugcugccccagaagguguggugcgccuccgggcgcagcaaggugaucaagggcagccucccccugaucggggaggcggacugccugcacgaggaguacggcgggcucaacaaguccaagccguacuacaccggcaagcacgccaaggccaucgggaacugccccaucugggucaagaccccgcugaagcuggccaacggcacgaaguaccggcccccggccaagcuccugaaggagcgcggcuucuucggggcgaucgccggcuuccuggagggcgggugggaggggaugaucgccggcuggcacggcuacaccagccacggggcccacggcguggccgucgcggccgaccucaaguccacccaggaggccaucaacaagaucaccaagaaccugaacagccuguccgagcucgaggugaagaaccugcagcggcugagcggggccauggacgagcuccacaacgagauccuggagcuggacgagaagguggacgaccuccgcgccgacacgaucuccagccagaucgagcuggcgguccugcucuccaacgagggcaucaucaacagcgaggacgagcaccuccuggcccucgagcggaagcugaagaagaugcugggccccuccgccguggacaucgggaacggcugcuucgagaccaagcacaagugcaaccagaccugccucgaccgcaucgccgcggggaccuucaacgccggcgaguucagccugcccaccuucgacucccugaacaucacggccgccagccugaacgacgacgggcucgacaaccacaccauccugcuguacuacuccaccgccgcgagcucccucgccgugacccugaugcuggccaucuucaucgucuacauggugagccgggacaacguguccugcagcaucugccucugaggacuaguuauaagacugacuagcccgaugggccucccaacgggcccuccuccccuccuugcaccgagauuaauaaaaaaaaaaaaaaaaaaaaaaaaaaaaaaaaaaaaaaaaaaaaaaaaaaaaaaaaaaaaaaaaugcaucccccccccccccccccccccccccccccccaaaggcucuuuucagagccaccagaauu

SEQ ID NO: 224255 - RNA, 2164 nt, Artificial Sequence
  mRNA product Design2 comprising derived and/or modified sequence from hemagglutinin__InfluenzaB__EPI540671 HLA-A2-SP_InfluBV(Phuket-3073-2013)-HA (CDS opt1)
ggggcgcugccuacggagguggcagccaucuccuucucggcaucaagcuuaccauggccgugauggccccgcggacccugguccuccugcugagcggcgcgcucgcccugacccagacgugggccgaccgcaucugcaccggcaucacguccagcaacuccccgcacguggucaagaccgcgacccagggggaggugaacgugaccggcgucaucccccugacgaccacccccaccaagagcuacuucgccaaccugaaggggacgcggacccgcggcaagcucugccccgacugccugaacugcaccgaccuggacguggcccucgggcggcccaugugcgugggcaccacgccguccgccaaggccagcauccugcacgagguccgccccgugaccuccggcugcuuccccaucaugcacgaccggaccaagauccgccagcugcccaaccuccugcggggguacgagaagauccgccugagcacccagaacgugaucgacgcggagaaggccccgggcgggcccuaccggcucggcacguccgggagcugccccaacgccaccuccaagaucggcuucuucgccaccauggcgugggccguccccaaggacaacuacaagaacgccaccaacccgcugacgguggaggugcccuacaucugcaccgagggcgaggaccagaucaccgucuggggguuccacagcgacaacaagacccagaugaagucccuguacggcgacagcaacccccagaaguucacguccagcgccaacggggugaccacccacuacgugucccagaucggcgacuuccccgaccagaccgaggacggcgggcucccgcagagcggccgcaucgucguggacuacaugaugcagaagcccgggaagacgggcaccaucguguaccagcggggcguccugcugccccagaagguguggugcgccuccgggcgcagcaaggugaucaagggcagccucccccugaucggggaggcggacugccugcacgaggaguacggcgggcucaacaaguccaagccguacuacaccggcaagcacgccaaggccaucgggaacugccccaucugggucaagaccccgcugaagcuggccaacggcacgaaguaccggcccccggccaagcuccugaaggagcgcggcuucuucggggcgaucgccggcuuccuggagggcgggugggaggggaugaucgccggcuggcacggcuacaccagccacggggcccacggcguggccgucgcggccgaccucaaguccacccaggaggccaucaacaagaucaccaagaaccugaacagccuguccgagcucgaggugaagaaccugcagcggcugagcggggccauggacgagcuccacaacgagauccuggagcuggacgagaagguggacgaccuccgcgccgacacgaucuccagccagaucgagcuggcgguccugcucuccaacgagggcaucaucaacagcgaggacgagcaccuccuggcccucgagcggaagcugaagaagaugcugggccccuccgccguggacaucgggaacggcugcuucgagaccaagcacaagugcaaccagaccugccucgaccgcaucgccgcggggaccuucaacgccggcgaguucagccugcccaccuucgacucccugaacaucacggccgccagccugaacgacgacgggcucgacaaccacaccauccugcuguacuacuccaccgccgcgagcucccucgccgugacccugaugcuggccaucuucaucgucuacauggugagccgggacaacguguccugcagcaucugccucugaggacuagugcaucacauuuaaaagcaucucagccuaccaugagaauaagagaaagaaaaugaagaucaauagcuuauucaucucuuuuucuuuuucguugguguaaagccaacacccugucuaaaaaacauaaauuucuuuaaucauuuugccucuuuucucugugcuucaauuaauaaaaaauggaaagaaccuagaucuaaaaaaaaaaaaaaaaaaaaaaaaaaaaaaaaaaaaaaaaaaaaaaaaaaaaaaaaaaaaaaaaugcaucccccccccccccccccccccccccccccccaaaggcucuuuucagagccaccagaauu

SEQ ID NO: 224256 - RNA, 1972 nt, Artificial Sequence
  mRNA product Design1 comprising derived and/or modified sequence from hemagglutinin__InfluenzaB__EPI573303 (CDS opt1) R4905
gggagaaagcuuaccaugaaggccaucaucgugcugcucauggucgugaccagcaacgccgaccgcaucugcaccggcaucacguccagcaacuccccgcacguggucaagaccgcgacccagggggaggugaacgugaccggcgucaucccccugacgaccacccccaccaagagcuacuucgccaaccugaaggggacgcggacccgcggcaagcucugccccgacugccugaacugcaccgaccuggacguggcccucgggcggcccaugugcgugggcaccacgccguccgccaaggccagcauccugcacgagguccgccccgugaccuccggcugcuuccccaucaugcacgaccggaccaagauccgccagcugcccaaccuccugcggggguacgagaagauccgccugagcacccagaacgugaucgacgcggagaaggccccgggcgggcccuaccggcucggcacguccgggagcugccccaacgccaccuccaagaucggcuucuucgccaccauggcgugggccguccccaaggacaacuacaagaacgccaccaacccgcugacgguggaggugcccuacaucugcaccgagggcgaggaccagaucaccgucuggggguuccacagcgacgacaagacccagaugaagucccuguacggcgacagcaacccccagaaguucacguccagcgccaacggggugaccacccacuacgugucccagaucggcgacuuccccgaccagaccgaggacggcgggcucccgcagagcggccgcaucgucguggacuacaugaugcagaagcccgggaagacgggcaccaucguguaccagcggggcguccugcugccccagaagguguggugcgccuccgggcgcagcaaggugaucaagggcagccucccccugaucggggaggcggacugccugcacgaggaguacggcgggcucaacaaguccaagccguacuacaccggcaagcacgccaaggccaucgggaacugccccaucugggucaagaccccgcugaagcuggccaacggcacgaaguaccggcccccggccaagcuccugaaggagcgcggcuucuucggggcgaucgccggcuuccuggagggcgggugggaggggaugaucgccggcuggcacggcuacaccagccacggggcccacggcguggccgucgcggccgaccucaaguccacccaggaggccaucaacaagaucaccaagaaccugaacagccuguccgagcucgaggugaagaaccugcagcggcugagcggggccauggacgagcuccacaacgagauccuggagcuggacgagaagguggacgaccuccgcgccgacacgaucuccagccagaucgagcuggcgguccugcucuccaacgagggcaucaucaacagcgaggacgagcaccuccuggcccucgagcggaagcugaagaagaugcugggccccuccgccguggacaucgggaacggcugcuucgagaccaagcacaagugcaaccagaccugccucgaccgcaucgccgcggggaccuucaacgccggcgaguucagccugcccaccuucgacucccugaacaucacggccgccagccugaacgacgacgggcucgacaaccacaccauccugcuguacuacuccaccgccgcgagcucccucgccgugacccugaugcuggccaucuucaucgucuacauggugagccgggacaacguguccugcagcaucugccucugaggacuaguuauaagacugacuagcccgaugggccucccaacgggcccuccuccccuccuugcaccgagauuaauaaaaaaaaaaaaaaaaaaaaaaaaaaaaaaaaaaaaaaaaaaaaaaaaaaaaaaaaaaaaaaaaugcaucccccccccccccccccccccccccccccccaaaggcucuuuucagagccaccagaauu

SEQ ID NO: 224257 - RNA, 2137 nt, Artificial Sequence
  mRNA product Design2 comprising derived and/or modified sequence from hemagglutinin__InfluenzaB__EPI573303 (CDS opt1) R5079
ggggcgcugccuacggagguggcagccaucuccuucucggcaucaagcuuaccaugaaggccaucaucgugcugcucauggucgugaccagcaacgccgaccgcaucugcaccggcaucacguccagcaacuccccgcacguggucaagaccgcgacccagggggaggugaacgugaccggcgucaucccccugacgaccacccccaccaagagcuacuucgccaaccugaaggggacgcggacccgcggcaagcucugccccgacugccugaacugcaccgaccuggacguggcccucgggcggcccaugugcgugggcaccacgccguccgccaaggccagcauccugcacgagguccgccccgugaccuccggcugcuuccccaucaugcacgaccggaccaagauccgccagcugcccaaccuccugcggggguacgagaagauccgccugagcacccagaacgugaucgacgcggagaaggccccgggcgggcccuaccggcucggcacguccgggagcugccccaacgccaccuccaagaucggcuucuucgccaccauggcgugggccguccccaaggacaacuacaagaacgccaccaacccgcugacgguggaggugcccuacaucugcaccgagggcgaggaccagaucaccgucuggggguuccacagcgacgacaagacccagaugaagucccuguacggcgacagcaacccccagaaguucacguccagcgccaacggggugaccacccacuacgugucccagaucggcgacuuccccgaccagaccgaggacggcgggcucccgcagagcggccgcaucgucguggacuacaugaugcagaagcccgggaagacgggcaccaucguguaccagcggggcguccugcugccccagaagguguggugcgccuccgggcgcagcaaggugaucaagggcagccucccccugaucggggaggcggacugccugcacgaggaguacggcgggcucaacaaguccaagccguacuacaccggcaagcacgccaaggccaucgggaacugccccaucugggucaagaccccgcugaagcuggccaacggcacgaaguaccggcccccggccaagcuccugaaggagcgcggcuucuucggggcgaucgccggcuuccuggagggcgggugggaggggaugaucgccggcuggcacggcuacaccagccacggggcccacggcguggccgucgcggccgaccucaaguccacccaggaggccaucaacaagaucaccaagaaccugaacagccuguccgagcucgaggugaagaaccugcagcggcugagcggggccauggacgagcuccacaacgagauccuggagcuggacgagaagguggacgaccuccgcgccgacacgaucuccagccagaucgagcuggcgguccugcucuccaacgagggcaucaucaacagcgaggacgagcaccuccuggcccucgagcggaagcugaagaagaugcugggccccuccgccguggacaucgggaacggcugcuucgagaccaagcacaagugcaaccagaccugccucgaccgcaucgccgcggggaccuucaacgccggcgaguucagccugcccaccuucgacucccugaacaucacggccgccagccugaacgacgacgggcucgacaaccacaccauccugcuguacuacuccaccgccgcgagcucccucgccgugacccugaugcuggccaucuucaucgucuacauggugagccgggacaacguguccugcagcaucugccucugaggacuagugcaucacauuuaaaagcaucucagccuaccaugagaauaagagaaagaaaaugaagaucaauagcuuauucaucucuuuuucuuuuucguugguguaaagccaacacccugucuaaaaaacauaaauuucuuuaaucauuuugccucuuuucucugugcuucaauuaauaaaaaauggaaagaaccuagaucuaaaaaaaaaaaaaaaaaaaaaaaaaaaaaaaaaaaaaaaaaaaaaaaaaaaaaaaaaaaaaaaaugcaucccccccccccccccccccccccccccccccaaaggcucuuuucagagccaccagaauu

SEQ ID NO: 224258 - RNA, 1972 nt, Artificial Sequence
  mRNA product Design1 comprising derived and/or modified sequence from hemagglutinin__InfluenzaB__NP_056660 (CDS opt1)
gggagaaagcuuaccaugaaggccaucaucgugcugcucauggucgugaccagcaacgccgaccgcaucugcaccggcaucacguccagcaacuccccgcacguggucaagaccgcgacccagggggaggugaacgugaccggcgucaucccgcugacgaccacccccaccaagagccacuucgccaaccugaaggggacgcagacccggggcaagcucugccccaacugcuucaacugcaccgaccuggacguggcccuggggcgccccaagugcaugggcaacaccccguccgccaaggugagcauccuccacgaggucaagcccgccacguccggcugcuuccccaucaugcacgaccggaccaagauccgccagcugcccaaccugcuccggggguacgagaacauccgccugagcaccuccaacgugaucaacaccgagacggcgcccggcgggcccuacaaggugggcaccagcggguccugccccaacgucgccaacggcaacggcuucuucaacaccauggccugggugauccccaaggacaacaacaagaccgccaucaaccccgugacggucgaggugcccuacaucugcagcgagggggaggaccagaucaccguguggggcuuccacuccgacgacaagacccagauggagcggcuguacggggacagcaacccccagaaguucaccuccagcgcgaacggcgucacgacccacuacgugucccagaucggcggguuccccaaccagaccgaggacgagggccucaagcagagcgggcgcaucguggucgacuacauggugcagaagccgggcaagaccgggacgaucguguaccagcggggcauccugcugccccagaaggucuggugcgccuccggccgcagcaaggugaucaaggggagccucccccugaucggcgaggccgacugccugcacgagaaguacgggggccucaacaaguccaagcccuacuacaccggggagcacgccaaggccaucggcaacugcccgaucugggucaagaccccgcugaagcuggcgaacggcaccaaguaccggccgcccgccaagcuccugaaggagcgcggguucuucggcgccaucgccggguuccuggagggcgggugggagggcaugaucgccggcuggcacggguacacgagccacggcgcgcacgggguggccguggccgccgaccucaaguccacccaggaggccaucaacaagaucaccaagaaccugaacuaccugagcgagcucgaggucaagaaccugcagcggcuguccggcgcgaugaacgagcuccacgacgagauccuggagcuggacgagaagguggacgaccuccgcgccgacaccaucagcucccagaucgagcuggccgugcugcucagcaacgagggcaucaucaacuccgaggacgagcaccugcuggcccucgagcggaagcugaagaagaugcuggggccgagcgccgucgagaucggcaacgggugcuucgagacgaagcacaagugcaaccagaccugccucgaccgcaucgcggccggcaccuucaacgccggggacuucucccugcccaccuucgacagccugaacaucaccgccgcgucccucaacgacgacggccuggacaaccacacgauccugcuguacuacagcaccgccgccuccagccucgccgugacccugaugaucgccaucuucaucguguacauggucucccgggacaacgugagcugcuccaucugccugugaggacuaguuauaagacugacuagcccgaugggccucccaacgggcccuccuccccuccuugcaccgagauuaauaaaaaaaaaaaaaaaaaaaaaaaaaaaaaaaaaaaaaaaaaaaaaaaaaaaaaaaaaaaaaaaaugcaucccccccccccccccccccccccccccccccaaaggcucuuuucagagccaccagaauu

SEQ ID NO: 224259 - RNA, 2137 nt, Artificial Sequence
  mRNA product Design2 comprising derived and/or modified sequence from hemagglutinin__InfluenzaB__NP_056660 (CDS opt1) R4643/R4644
ggggcgcugccuacggagguggcagccaucuccuucucggcaucaagcuuaccaugaaggccaucaucgugcugcucauggucgugaccagcaacgccgaccgcaucugcaccggcaucacguccagcaacuccccgcacguggucaagaccgcgacccagggggaggugaacgugaccggcgucaucccgcugacgaccacccccaccaagagccacuucgccaaccugaaggggacgcagacccggggcaagcucugccccaacugcuucaacugcaccgaccuggacguggcccuggggcgccccaagugcaugggcaacaccccguccgccaaggugagcauccuccacgaggucaagcccgccacguccggcugcuuccccaucaugcacgaccggaccaagauccgccagcugcccaaccugcuccggggguacgagaacauccgccugagcaccuccaacgugaucaacaccgagacggcgcccggcgggcccuacaaggugggcaccagcggguccugccccaacgucgccaacggcaacggcuucuucaacaccauggccugggugauccccaaggacaacaacaagaccgccaucaaccccgugacggucgaggugcccuacaucugcagcgagggggaggaccagaucaccguguggggcuuccacuccgacgacaagacccagauggagcggcuguacggggacagcaacccccagaaguucaccuccagcgcgaacggcgucacgacccacuacgugucccagaucggcggguuccccaaccagaccgaggacgagggccucaagcagagcgggcgcaucguggucgacuacauggugcagaagccgggcaagaccgggacgaucguguaccagcggggcauccugcugccccagaaggucuggugcgccuccggccgcagcaaggugaucaaggggagccucccccugaucggcgaggccgacugccugcacgagaaguacgggggccucaacaaguccaagcccuacuacaccggggagcacgccaaggccaucggcaacugcccgaucugggucaagaccccgcugaagcuggcgaacggcaccaaguaccggccgcccgccaagcuccugaaggagcgcggguucuucggcgccaucgccggguuccuggagggcgggugggagggcaugaucgccggcuggcacggguacacgagccacggcgcgcacgggguggccguggccgccgaccucaaguccacccaggaggccaucaacaagaucaccaagaaccugaacuaccugagcgagcucgaggucaagaaccugcagcggcuguccggcgcgaugaacgagcuccacgacgagauccuggagcuggacgagaagguggacgaccuccgcgccgacaccaucagcucccagaucgagcuggccgugcugcucagcaacgagggcaucaucaacuccgaggacgagcaccugcuggcccucgagcggaagcugaagaagaugcuggggccgagcgccgucgagaucggcaacgggugcuucgagacgaagcacaagugcaaccagaccugccucgaccgcaucgcggccggcaccuucaacgccggggacuucucccugcccaccuucgacagccugaacaucaccgccgcgucccucaacgacgacggccuggacaaccacacgauccugcuguacuacagcaccgccgccuccagccucgccgugacccugaugaucgccaucuucaucguguacauggucucccgggacaacgugagcugcuccaucugccugugaggacuagugcaucacauuuaaaagcaucucagccuaccaugagaauaagagaaagaaaaugaagaucaauagcuuauucaucucuuuuucuuuuucguugguguaaagccaacacccugucuaaaaaacauaaauuucuuuaaucauuuugccucuuuucucugugcuucaauuaauaaaaaauggaaagaaccuagaucuaaaaaaaaaaaaaaaaaaaaaaaaaaaaaaaaaaaaaaaaaaaaaaaaaaaaaaaaaaaaaaaaugcaucccccccccccccccccccccccccccccccaaaggcucuuuucagagccaccagaauu

SEQ ID NO: 224260 - RNA, 1972 nt, Artificial Sequence
  mRNA product Design1 comprising derived and/or modified sequence from hemagglutinin__InfluenzaB__ABG85167 (CDS opt1)
gggagaaagcuuaccaugaaggccaucaucgugcugcucauggucgugaccagcaacgccgaccgcaucugcaccggcaucacguccagcaacuccccgcacguggucaagaccgcgacccagggggaggugaacgugaccggcgucaucccgcugacgaccacccccacccggagccacuucgccaaccugaaggggacgcagacccggggcaagcucugccccaacugcuucaacugcaccgaccuggacguggcccuggggcgccccaagugcaugggcaacaucccguccgccaaggugagcauccuccacgaggucaagcccgugacguccggcugcuuccccaucaugcacgaccggaccaagauccgccagcugcccaaccugcuccggggguacgagaacauccgccugagcaccuccaacgugaucaacgccgagacggcgcccggcgggcccuacaaggugggcaccagcggguccugccccaacgucgccaaccgcaacggcuucuucaacaccauggccugggugauccccaaggacaacaacaagaccgccaucaaccccgugacggucgaggugcccuacaucugcagcgagggggaggaccagaucaccguguggggcuuccacuccgacgacaagacccagauggagcggcuguacggggacagcaacccccagaaguucaccuccagcgcgaacggcgucacgacccacuacgugucccagaucggcggguuccccaaccagaccgaggacgagggccucaagcagagcgggcgcaucguggucgacuacauggugcagaagccgggcaagaccgggacgaucguguaccagcggggcauccugcugccccagaaggucuggugcgccuccggccgcagcaaggugaucaaggggagccucccccugaucggcgaggccgacugccugcacgagaaguacgggggccucaacaaguccaagcccuacuacaccggggagcacgccaaggccaucggcaacugcccgaucugggucaagaccccgcugaagcuggcgaacggcaccaaguaccggccgcccgccaagcuccugaaggagcgcggguucuucggcgccaucgccggguuccuggagggcgggugggagggcaugaucgccggcuggcacggguacacgagccacggcgcgcacgggguggccguggccgccgaccucaaguccacccaggaggccaucaacaagaucaccaagaaccugaacagccugagcgagcucgaggucaagaaccugcagcggcuguccggcgcgaugaacggccuccacgacgagauccuggagcuggacgagaagguggacgaccuccgcgccgacaccaucagcucccagaucgagcuggccgugcugcucagcaacgagggcaucaucaacuccgaggacgagcaccugcuggcccucgagcggaagcugaagaagaugcuggggccgagcgccgucgagaucggcaacgggugcuucgagacgaagcacaagugcaaccagaccugccucgaccgcaucgcggccggcaccuucaacgccggggacuucucccugcccaccuucgacagccugaacaucaccgccgcgucccucaacgacgacgaccuggacaaccacacgauccugcuguacuacagcaccgccgccuccagccucgccgugacccugaugaucgccaucuucaucguguacauggucucccgggacaacgugagcugcuccaucugccugugaggacuaguuauaagacugacuagcccgaugggccucccaacgggcccuccuccccuccuugcaccgagauuaauaaaaaaaaaaaaaaaaaaaaaaaaaaaaaaaaaaaaaaaaaaaaaaaaaaaaaaaaaaaaaaaaugcaucccccccccccccccccccccccccccccccaaaggcucuuuucagagccaccagaauu

SEQ ID NO: 224261 - RNA, 2137 nt, Artificial Sequence
  mRNA product Design2 comprising derived and/or modified sequence from hemagglutinin__InfluenzaB__ABG85167 (CDS opt1) R4645/R4646
ggggcgcugccuacggagguggcagccaucuccuucucggcaucaagcuuaccaugaaggccaucaucgugcugcucauggucgugaccagcaacgccgaccgcaucugcaccggcaucacguccagcaacuccccgcacguggucaagaccgcgacccagggggaggugaacgugaccggcgucaucccgcugacgaccacccccacccggagccacuucgccaaccugaaggggacgcagacccggggcaagcucugccccaacugcuucaacugcaccgaccuggacguggcccuggggcgccccaagugcaugggcaacaucccguccgccaaggugagcauccuccacgaggucaagcccgugacguccggcugcuuccccaucaugcacgaccggaccaagauccgccagcugcccaaccugcuccggggguacgagaacauccgccugagcaccuccaacgugaucaacgccgagacggcgcccggcgggcccuacaaggugggcaccagcggguccugccccaacgucgccaaccgcaacggcuucuucaacaccauggccugggugauccccaaggacaacaacaagaccgccaucaaccccgugacggucgaggugcccuacaucugcagcgagggggaggaccagaucaccguguggggcuuccacuccgacgacaagacccagauggagcggcuguacggggacagcaacccccagaaguucaccuccagcgcgaacggcgucacgacccacuacgugucccagaucggcggguuccccaaccagaccgaggacgagggccucaagcagagcgggcgcaucguggucgacuacauggugcagaagccgggcaagaccgggacgaucguguaccagcggggcauccugcugccccagaaggucuggugcgccuccggccgcagcaaggugaucaaggggagccucccccugaucggcgaggccgacugccugcacgagaaguacgggggccucaacaaguccaagcccuacuacaccggggagcacgccaaggccaucggcaacugcccgaucugggucaagaccccgcugaagcuggcgaacggcaccaaguaccggccgcccgccaagcuccugaaggagcgcggguucuucggcgccaucgccggguuccuggagggcgggugggagggcaugaucgccggcuggcacggguacacgagccacggcgcgcacgggguggccguggccgccgaccucaaguccacccaggaggccaucaacaagaucaccaagaaccugaacagccugagcgagcucgaggucaagaaccugcagcggcuguccggcgcgaugaacggccuccacgacgagauccuggagcuggacgagaagguggacgaccuccgcgccgacaccaucagcucccagaucgagcuggccgugcugcucagcaacgagggcaucaucaacuccgaggacgagcaccugcuggcccucgagcggaagcugaagaagaugcuggggccgagcgccgucgagaucggcaacgggugcuucgagacgaagcacaagugcaaccagaccugccucgaccgcaucgcggccggcaccuucaacgccggggacuucucccugcccaccuucgacagccugaacaucaccgccgcgucccucaacgacgacgaccuggacaaccacacgauccugcuguacuacagcaccgccgccuccagccucgccgugacccugaugaucgccaucuucaucguguacauggucucccgggacaacgugagcugcuccaucugccugugaggacuagugcaucacauuuaaaagcaucucagccuaccaugagaauaagagaaagaaaaugaagaucaauagcuuauucaucucuuuuucuuuuucguugguguaaagccaacacccugucuaaaaaacauaaauuucuuuaaucauuuugccucuuuucucugugcuucaauuaauaaaaaauggaaagaaccuagaucuaaaaaaaaaaaaaaaaaaaaaaaaaaaaaaaaaaaaaaaaaaaaaaaaaaaaaaaaaaaaaaaaugcaucccccccccccccccccccccccccccccccaaaggcucuuuucagagccaccagaauu

SEQ ID NO: 224262 - RNA, 1972 nt, Artificial Sequence
  mRNA product Design1 comprising derived and/or modified sequence from hemagglutinin__InfluenzaB__EPI376346 (CDS opt1)
gggagaaagcuuaccaugaaggccaucaucgugcugcucauggucgugaccagcaacgccgaccgcaucugcaccggcaucacguccagcaacuccccgcacguggucaagaccgcgacccagggggaggugaacgugaccggcgucaucccccugacgaccacccccaccaagagcuacuucgccaaccugaaggggacgaagacccggggcaagcucugccccgacugccugaacugcaccgaccuggacguggcccucgggcgccccaugugcgugggcaccacgccguccgccaaggccagcauccugcacgagguccggcccgugaccuccggcugcuuccccaucaugcacgaccgcaccaagauccggcagcuggcgaaccuccugcgcggguacgagaacauccggcugagcacccagaacgugaucgacgccgagaaggcccccggcgggccguaccgccucggcacguccgggagcugccccaacgccaccuccaagagcggcuucuucgcgaccauggccugggccguccccaaggacaacaacaagaacgccaccaacccccugacgguggaggugccguacaucugcgccgagggcgaggaccagaucaccgucuggggguuccacuccgacgacaagacccagaugaagaaccuguacggcgacagcaacccccagaaguucaccuccagcgcgaacggggugacgacccacuacgugucccagaucggcggcuuccccgaccagaccgaggacgggggccucccccagagcgggcggaucgucguggacuacaugaugcagaagccgggcaagaccgggacgaucguguaccagcgcggcguccugcugccccagaagguguggugcgccuccggccggagcaaggugaucaaggggagccucccccugaucggcgaggccgacugccugcacgagaaguacgggggccucaacaaguccaagccguacuacaccggggagcacgccaaggccaucggcaacugccccaucugggucaagaccccgcugaagcuggcgaacggcaccaaguaccgcccgcccgccaagcuccugaaggagcggggguucuucggcgccaucgccggguuccuggagggcgggugggagggcaugaucgccggcuggcacggguacacgagccacggcgcgcacgggguggccgucgccgccgaccucaaguccacccaggaggccaucaacaagaucaccaagaaccugaacagccuguccgagcucgaggugaagaaccugcagcgccugagcggcgcgauggacgagcuccacaacgagauccuggagcuggacgagaagguggacgaccuccgggccgacaccaucuccagccagaucgagcuggccguccugcucuccaacgagggcaucaucaacagcgaggacgagcaccugcuggcccucgagcgcaagcugaagaagaugcuggggccguccgcgguggacaucggcaacgggugcuucgagacgaagcacaagugcaaccagaccugccucgaccggaucgccgccggcaccuucaacgccggggaguucagccugcccaccuucgacucccugaacaucaccgccgcgagccugaacgacgacggccucgacaaccacacgauccugcuguacuacuccaccgccgccagcucccucgccgugacccugaugcuggccaucuucaucgucuacauggugagccgcgacaacguguccugcagcaucugccucugaggacuaguuauaagacugacuagcccgaugggccucccaacgggcccuccuccccuccuugcaccgagauuaauaaaaaaaaaaaaaaaaaaaaaaaaaaaaaaaaaaaaaaaaaaaaaaaaaaaaaaaaaaaaaaaaugcaucccccccccccccccccccccccccccccccaaaggcucuuuucagagccaccagaauu

SEQ ID NO: 224263 - RNA, 2137 nt, Artificial Sequence
  mRNA product Design2 comprising derived and/or modified sequence from hemagglutinin__InfluenzaB__EPI376346 (CDS opt1) R3236/R3237
ggggcgcugccuacggagguggcagccaucuccuucucggcaucaagcuuaccaugaaggccaucaucgugcugcucauggucgugaccagcaacgccgaccgcaucugcaccggcaucacguccagcaacuccccgcacguggucaagaccgcgacccagggggaggugaacgugaccggcgucaucccccugacgaccacccccaccaagagcuacuucgccaaccugaaggggacgaagacccggggcaagcucugccccgacugccugaacugcaccgaccuggacguggcccucgggcgccccaugugcgugggcaccacgccguccgccaaggccagcauccugcacgagguccggcccgugaccuccggcugcuuccccaucaugcacgaccgcaccaagauccggcagcuggcgaaccuccugcgcggguacgagaacauccggcugagcacccagaacgugaucgacgccgagaaggcccccggcgggccguaccgccucggcacguccgggagcugccccaacgccaccuccaagagcggcuucuucgcgaccauggccugggccguccccaaggacaacaacaagaacgccaccaacccccugacgguggaggugccguacaucugcgccgagggcgaggaccagaucaccgucuggggguuccacuccgacgacaagacccagaugaagaaccuguacggcgacagcaacccccagaaguucaccuccagcgcgaacggggugacgacccacuacgugucccagaucggcggcuuccccgaccagaccgaggacgggggccucccccagagcgggcggaucgucguggacuacaugaugcagaagccgggcaagaccgggacgaucguguaccagcgcggcguccugcugccccagaagguguggugcgccuccggccggagcaaggugaucaaggggagccucccccugaucggcgaggccgacugccugcacgagaaguacgggggccucaacaaguccaagccguacuacaccggggagcacgccaaggccaucggcaacugccccaucugggucaagaccccgcugaagcuggcgaacggcaccaaguaccgcccgcccgccaagcuccugaaggagcggggguucuucggcgccaucgccggguuccuggagggcgggugggagggcaugaucgccggcuggcacggguacacgagccacggcgcgcacgggguggccgucgccgccgaccucaaguccacccaggaggccaucaacaagaucaccaagaaccugaacagccuguccgagcucgaggugaagaaccugcagcgccugagcggcgcgauggacgagcuccacaacgagauccuggagcuggacgagaagguggacgaccuccgggccgacaccaucuccagccagaucgagcuggccguccugcucuccaacgagggcaucaucaacagcgaggacgagcaccugcuggcccucgagcgcaagcugaagaagaugcuggggccguccgcgguggacaucggcaacgggugcuucgagacgaagcacaagugcaaccagaccugccucgaccggaucgccgccggcaccuucaacgccggggaguucagccugcccaccuucgacucccugaacaucaccgccgcgagccugaacgacgacggccucgacaaccacacgauccugcuguacuacuccaccgccgccagcucccucgccgugacccugaugcuggccaucuucaucgucuacauggugagccgcgacaacguguccugcagcaucugccucugaggacuagugcaucacauuuaaaagcaucucagccuaccaugagaauaagagaaagaaaaugaagaucaauagcuuauucaucucuuuuucuuuuucguugguguaaagccaacacccugucuaaaaaacauaaauuucuuuaaucauuuugccucuuuucucugugcuucaauuaauaaaaaauggaaagaaccuagaucuaaaaaaaaaaaaaaaaaaaaaaaaaaaaaaaaaaaaaaaaaaaaaaaaaaaaaaaaaaaaaaaaugcaucccccccccccccccccccccccccccccccaaaggcucuuuucagagccaccagaauu

SEQ ID NO: 224264 - RNA, 1569 nt, Artificial Sequence
  mRNA product Design4 comprising derived and/or modified sequence from neuraminidase__InfluenzaA__ABD77678/m1 (CDS opt1) R904/R997
gggagaaagcuuaccaugaaccccaaccagaagaucaucaccaucggcagcaucugccugguggucgggcucaucucccugauccugcagaucggcaacaucaucagcaucuggaucucccacagcauccagaccgggucccagaaccacacgggcaucugcaaccagaacaucaucaccuacaagaacagcaccugggugaaggacaccacguccgugauccucaccgggaacagcucccugugcccgauccggggcugggccaucuacagcaaggacaacuccauccgcaucggcagcaagggggacgucuucgugauccgggagcccuucaucuccugcagccaccuggagugccgcaccuucuuccucacccagggcgcccugcugaacgacaagcacuccagcgggacggugaaggaccggucccccuaccgcgcgcucaugagcugccccgucggcgaggccccgucccccuacaacagccgguucgagagcguggccugguccgccagcgccugccacgacgggaugggcuggcugaccaucggcaucuccgggcccgacaacggcgcgguggccguccugaaguacaacgggaucaucaccgagaccaucaagagcuggcgcaagaagauccuccggacgcaggaguccgagugcgccugcgugaacggcagcugcuucaccaucaugaccgacggccccuccgacgggcuggccagcuacaagaucuucaagaucgagaagggcaaggugaccaaguccaucgagcugaacgcgccgaacagccacuacgaggagugcuccugcuaccccgacacggggaaggucaugugcgugugccgcgacaacuggcacggcagcaaccggcccuggguguccuucgaccagaaccucgacuaccagaucggguacaucugcagcggcgucuucggcgacaacccccgcccggaggacgggaccggcuccugcgggcccguguacguggacggcgccaacggggucaagggcuucagcuaccgguacggcaacgggguguggaucggccgcaccaagucccacagcucccggcacggguucgagaugaucugggaccccaacggcuggaccgagacggacagcaaguucagcgugcgccaggacgucguggccaugaccgacugguccggguacagcggcuccuucgugcagcaccccgagcugaccggccuggacugcaugcggccgugcuucugggucgagcucauccgcgggcggcccaaggagaagaccaucuggacgagcgccuccagcaucuccuucugcggcgugaacagcgacaccgucgacugguccuggcccgacggggccgagcugcccuucagcaucgacaagugaccacuaguuauaagacugacuagcccgaugggccucccaacgggcccuccuccccuccuugcaccgagauuaauaaaaaaaaaaaaaaaaaaaaaaaaaaaaaaaaaaaaaaaaaaaaaaaaaaaaaaaaaaaaaaaauauuccccccccccccccccccccccccccccccucuagacaauuggaauu

SEQ ID NO: 224265 - RNA, 1582 nt, Artificial Sequence
  mRNA product Design1 comprising derived and/or modified sequence from neuraminidase__InfluenzaA__ABD77678/m1 (CDS opt1)
gggagaaagcuuaccaugaaccccaaccagaagaucaucaccaucggcagcaucugccugguggucgggcucaucucccugauccugcagaucggcaacaucaucagcaucuggaucucccacagcauccagaccgggucccagaaccacacgggcaucugcaaccagaacaucaucaccuacaagaacagcaccugggugaaggacaccacguccgugauccucaccgggaacagcucccugugcccgauccggggcugggccaucuacagcaaggacaacuccauccgcaucggcagcaagggggacgucuucgugauccgggagcccuucaucuccugcagccaccuggagugccgcaccuucuuccucacccagggcgcccugcugaacgacaagcacuccagcgggacggugaaggaccggucccccuaccgcgcgcucaugagcugccccgucggcgaggccccgucccccuacaacagccgguucgagagcguggccugguccgccagcgccugccacgacgggaugggcuggcugaccaucggcaucuccgggcccgacaacggcgcgguggccguccugaaguacaacgggaucaucaccgagaccaucaagagcuggcgcaagaagauccuccggacgcaggaguccgagugcgccugcgugaacggcagcugcuucaccaucaugaccgacggccccuccgacgggcuggccagcuacaagaucuucaagaucgagaagggcaaggugaccaaguccaucgagcugaacgcgccgaacagccacuacgaggagugcuccugcuaccccgacacggggaaggucaugugcgugugccgcgacaacuggcacggcagcaaccggcccuggguguccuucgaccagaaccucgacuaccagaucggguacaucugcagcggcgucuucggcgacaacccccgcccggaggacgggaccggcuccugcgggcccguguacguggacggcgccaacggggucaagggcuucagcuaccgguacggcaacgggguguggaucggccgcaccaagucccacagcucccggcacggguucgagaugaucugggaccccaacggcuggaccgagacggacagcaaguucagcgugcgccaggacgucguggccaugaccgacugguccggguacagcggcuccuucgugcagcaccccgagcugaccggccuggacugcaugcggccgugcuucugggucgagcucauccgcgggcggcccaaggagaagaccaucuggacgagcgccuccagcaucuccuucugcggcgugaacagcgacaccgucgacugguccuggcccgacggggccgagcugcccuucagcaucgacaagugaccacuaguuauaagacugacuagcccgaugggccucccaacgggcccuccuccccuccuugcaccgagauuaauaaaaaaaaaaaaaaaaaaaaaaaaaaaaaaaaaaaaaaaaaaaaaaaaaaaaaaaaaaaaaaaaugcaucccccccccccccccccccccccccccccccaaaggcucuuuucagagccaccagaauu

SEQ ID NO: 224266 - RNA, 1747 nt, Artificial Sequence
  mRNA product Design2 comprising derived and/or modified sequence from neuraminidase__InfluenzaA__ABD77678/m1 (CDS opt1)
ggggcgcugccuacggagguggcagccaucuccuucucggcaucaagcuuaccaugaaccccaaccagaagaucaucaccaucggcagcaucugccugguggucgggcucaucucccugauccugcagaucggcaacaucaucagcaucuggaucucccacagcauccagaccgggucccagaaccacacgggcaucugcaaccagaacaucaucaccuacaagaacagcaccugggugaaggacaccacguccgugauccucaccgggaacagcucccugugcccgauccggggcugggccaucuacagcaaggacaacuccauccgcaucggcagcaagggggacgucuucgugauccgggagcccuucaucuccugcagccaccuggagugccgcaccuucuuccucacccagggcgcccugcugaacgacaagcacuccagcgggacggugaaggaccggucccccuaccgcgcgcucaugagcugccccgucggcgaggccccgucccccuacaacagccgguucgagagcguggccugguccgccagcgccugccacgacgggaugggcuggcugaccaucggcaucuccgggcccgacaacggcgcgguggccguccugaaguacaacgggaucaucaccgagaccaucaagagcuggcgcaagaagauccuccggacgcaggaguccgagugcgccugcgugaacggcagcugcuucaccaucaugaccgacggccccuccgacgggcuggccagcuacaagaucuucaagaucgagaagggcaaggugaccaaguccaucgagcugaacgcgccgaacagccacuacgaggagugcuccugcuaccccgacacggggaaggucaugugcgugugccgcgacaacuggcacggcagcaaccggcccuggguguccuucgaccagaaccucgacuaccagaucggguacaucugcagcggcgucuucggcgacaacccccgcccggaggacgggaccggcuccugcgggcccguguacguggacggcgccaacggggucaagggcuucagcuaccgguacggcaacgggguguggaucggccgcaccaagucccacagcucccggcacggguucgagaugaucugggaccccaacggcuggaccgagacggacagcaaguucagcgugcgccaggacgucguggccaugaccgacugguccggguacagcggcuccuucgugcagcaccccgagcugaccggccuggacugcaugcggccgugcuucugggucgagcucauccgcgggcggcccaaggagaagaccaucuggacgagcgccuccagcaucuccuucugcggcgugaacagcgacaccgucgacugguccuggcccgacggggccgagcugcccuucagcaucgacaagugaccacuagugcaucacauuuaaaagcaucucagccuaccaugagaauaagagaaagaaaaugaagaucaauagcuuauucaucucuuuuucuuuuucguugguguaaagccaacacccugucuaaaaaacauaaauuucuuuaaucauuuugccucuuuucucugugcuucaauuaauaaaaaauggaaagaaccuagaucuaaaaaaaaaaaaaaaaaaaaaaaaaaaaaaaaaaaaaaaaaaaaaaaaaaaaaaaaaaaaaaaaugcaucccccccccccccccccccccccccccccccaaaggcucuuuucagagccaccagaauu

SEQ ID NO: 224267 - RNA, 1225 nt, Artificial Sequence
  mRNA product Design1 comprising derived and/or modified sequence from EGFP (CDS wt) R1592/R1594
gggagaaagcucuagcaccauggccgugauggccccgcggacccugguccuccugcugagcggcgcgcucgcccugacccagacgugggccggguccaagcuuauggugagcaagggcgaggagcuguucaccgggguggugcccauccuggucgagcuggacggcgacguaaacggccacaaguucagcguguccggcgagggcgagggcgaugccaccuacggcaagcugacccugaaguucaucugcaccaccggcaagcugcccgugcccuggcccacccucgugaccacccugaccuacggcgugcagugcuucagccgcuaccccgaccacaugaagcagcacgacuucuucaaguccgccaugcccgaaggcuacguccaggagcgcaccaucuucuucaaggacgacggcaacuacaagacccgcgccgaggugaaguucgagggcgacacccuggugaaccgcaucgagcugaagggcaucgacuucaaggaggacggcaacauccuggggcacaagcuggaguacaacuacaacagccacaacgucuauaucauggccgacaagcagaagaacggcaucaaggugaacuucaagauccgccacaacaucgaggacggcagcgugcagcucgccgaccacuaccagcagaacacccccaucggcgacggccccgugcugcugcccgacaaccacuaccugagcacccaguccgcccugagcaaagaccccaacgagaagcgcgaucacaugguccugcuggaguucgugaccgccgccgggaucacucucggcauggacgagcuguacaaggacuacaaggacgacgacgacaagacuaguauccccaucgugggcaucaucgccgggcugguccucuucggcgccgugaucaccggggcgguggucgccgccgugauguggcggcgcaagagcuccgaccggaagggcgggagcuacucccaggccgccagcuccgacagcgcgcagggcuccgacgugagccugaccgccugagucuaguuauaagacugacuagcccgaugggccucccaacgggcccuccuccccuccuugcaccgagauuaauaaaaaaaaaaaaaaaaaaaaaaaaaaaaaaaaaaaaaaaaaaaaaaaaaaaaaaaaaaaaaaaaugcaucccccccccccccccccccccccccccccccaaaggcucuuuucagagccaccagaauu

SEQ ID NO: 224268 - RNA, 1387 nt, Artificial Sequence
  mRNA product Design2 comprising derived and/or modified sequence from EGFP (CDS wt)
ggggcgcugccuacggagguggcagccaucuccuucucggcaucaagcuuaccauggccgugauggccccgcggacccugguccuccugcugagcggcgcgcucgcccugacccagacgugggccggguccaagcuuauggugagcaagggcgaggagcuguucaccgggguggugcccauccuggucgagcuggacggcgacguaaacggccacaaguucagcguguccggcgagggcgagggcgaugccaccuacggcaagcugacccugaaguucaucugcaccaccggcaagcugcccgugcccuggcccacccucgugaccacccugaccuacggcgugcagugcuucagccgcuaccccgaccacaugaagcagcacgacuucuucaaguccgccaugcccgaaggcuacguccaggagcgcaccaucuucuucaaggacgacggcaacuacaagacccgcgccgaggugaaguucgagggcgacacccuggugaaccgcaucgagcugaagggcaucgacuucaaggaggacggcaacauccuggggcacaagcuggaguacaacuacaacagccacaacgucuauaucauggccgacaagcagaagaacggcaucaaggugaacuucaagauccgccacaacaucgaggacggcagcgugcagcucgccgaccacuaccagcagaacacccccaucggcgacggccccgugcugcugcccgacaaccacuaccugagcacccaguccgcccugagcaaagaccccaacgagaagcgcgaucacaugguccugcuggaguucgugaccgccgccgggaucacucucggcauggacgagcuguacaaggacuacaaggacgacgacgacaagacuaguauccccaucgugggcaucaucgccgggcugguccucuucggcgccgugaucaccggggcgguggucgccgccgugauguggcggcgcaagagcuccgaccggaagggcgggagcuacucccaggccgccagcuccgacagcgcgcagggcuccgacgugagccugaccgccugaggacuagugcaucacauuuaaaagcaucucagccuaccaugagaauaagagaaagaaaaugaagaucaauagcuuauucaucucuuuuucuuuuucguugguguaaagccaacacccugucuaaaaaacauaaauuucuuuaaucauuuugccucuuuucucugugcuucaauuaauaaaaaauggaaagaaccuagaucuaaaaaaaaaaaaaaaaaaaaaaaaaaaaaaaaaaaaaaaaaaaaaaaaaaaaaaaaaaaaaaaaugcaucccccccccccccccccccccccccccccccaaaggcucuuuucagagccaccagaauu

SEQ ID NO: 224269 - protein, 334 aa, Artificial Sequence
  derived and/or modified protein sequence from EGFP (CDS wt)
MAVMAPRTLVLLLSGALALTQTWAGSKLMVSKGEELFTGVVPILVELDGDVNGHKFSVSGEGEGDATYGKLTLKFICTTGKLPVPWPTLVTTLTYGVQCFSRYPDHMKQHDFFKSAMPEGYVQERTIFFKDDGNYKTRAEVKFEGDTLVNRIELKGIDFKEDGNILGHKLEYNYNSHNVYIMADKQKNGIKVNFKIRHNIEDGSVQLADHYQQNTPIGDGPVLLPDNHYLSTQSALSKDPNEKRDHMVLLEFVTAAGITLGMDELYKDYKDDDDKTSIPIVGIIAGLVLFGAVITGAVVAAVMWRRKSSDRKGGSYSQAASSDSAQGSDVSLTA

SEQ ID NO: 224270 - RNA, 1575 nt, Artificial Sequence
  derived and/or modified CDS sequence (wt) from glycoprotein__RABV__M13215.1
augguuccucaggcucuccuguuuguaccccuucugguuuuuccauuguguuuugggaaauucccuauuuacacgauaccagacaaguugggucccuggagcccgauugacauacaucaccucagcugcccaaacaauuugguaguggaggacgaaggaugcaccaaccugucaggguucuccuacauggaacuuaaaguuggauacaucucagccauaaaaaugaacggguucacuugcacaggcguugugacggaggcugaaaccuacacuaacuucguugguuaugucacaaccacguucaaaagaaagcauuuccgcccaacaccagaugcuuguagagccgcguacaacuggaagauggccggugaccccagauaugaagagucucuacacaauccguacccugacuaccacuggcuucgaacuguaaaaaccaccaaggagucucucguuaucauaucuccaaguguggcagauuuggacccauaugacagaucccuucacucgagggucuucccuggcgggaauugcucaggaguagcggugucuucuaccuacugcuccacuaaccacgauuacaccauuuggaugcccgagaauccgagacuagggaugucuugugacauuuuuaccaauaguagagggaagagagcauccaaagggagugagacuugcggcuuuguagaugaaagaggccuauauaagucuuuaaaaggagcaugcaaacucaaguuauguggaguucuaggacuuagacuuauggauggaacaugggucgcgaugcaaacaucaaaugaaaccaaauggugcccucccggucaguuggugaauuugcacgacuuucgcucagacgaaauugagcaccuuguuguagaggaguuggucaagaagagagaggagugucuggaugcacuagaguccaucaugaccaccaagucagugaguuucagacgucucagucauuuaagaaaacuugucccuggguuuggaaaagcauauaccauauucaacaagaccuugauggaagccgaugcucacuacaagucagucagaacuuggaaugagaucaucccuucaaaaggguguuuaagaguuggggggaggugucauccucauguaaacgggguauuuuucaaugguauuauauuaggaccugacggcaaugucuuaaucccagagaugcaaucaucccuccuccagcaacauauggaguuguugguauccucgguuaucccccuuaugcacccccuggcagacccgucuaccguuuucaagaacggugacgaggcugaggauuuuguugaaguucaccuucccgaugugcacgaacggaucucaggaguugacuugggucucccgaacugggggaaguauguauuacugagugcaggggcccugacugccuugauguugauaauuuuccugaugacaugcuggagaagagucaaucgaucggaaccuacacaacacaaucucagagggacagggagggaggugucagucacuccccaaagcgggaagaucauaucuucaugggaaucauacaagagcgggggugagaccggacuguga

SEQ ID NO: 224271 - RNA, 1575 nt, Artificial Sequence
  derived and/or modified CDS sequence (opt1) from glycoprotein__RABV__M13215.1
auggugccccaggcccugcucuucgucccgcugcugguguucccccucugcuucggcaaguuccccaucuacaccauccccgacaagcuggggccguggagccccaucgacauccaccaccuguccugccccaacaaccucguggucgaggacgagggcugcaccaaccugagcggguucuccuacauggagcugaaggugggcuacaucagcgccaucaagaugaacggguucacgugcaccggcguggucaccgaggcggagaccuacacgaacuucgugggcuacgugaccaccaccuucaagcggaagcacuuccgccccacgccggacgccugccgggccgccuacaacuggaagauggccggggacccccgcuacgaggagucccuccacaaccccuaccccgacuaccacuggcugcggaccgucaagaccaccaaggagagccuggugaucaucuccccgagcguggcggaccucgaccccuacgaccgcucccugcacagccgggucuuccccggcgggaacugcuccggcguggccgugagcuccacguacugcagcaccaaccacgacuacaccaucuggaugcccgagaacccgcgccuggggauguccugcgacaucuucaccaacagccggggcaagcgcgccuccaagggcagcgagacgugcggguucgucgacgagcggggccucuacaagucccugaagggggccugcaagcugaagcucugcggcgugcugggccugcgccucauggacgggaccuggguggcgaugcagaccagcaacgagaccaaguggugcccccccggccagcuggucaaccugcacgacuuccggagcgacgagaucgagcaccucgugguggaggagcuggucaagaagcgcgaggagugccuggacgcccucgaguccaucaugacgaccaagagcguguccuuccggcgccugagccaccugcggaagcucgugcccggguucggcaaggccuacaccaucuucaacaagacccugauggaggccgacgcccacuacaaguccguccgcacguggaacgagaucaucccgagcaaggggugccugcgggugggcggccgcugccacccccacgucaacgggguguucuucaacggcaucauccucgggcccgacggcaacgugcugauccccgagaugcaguccagccugcuccagcagcacauggagcugcuggucuccagcgugaucccgcucaugcacccccuggcggaccccuccaccguguucaagaacggggacgaggccgaggacuucgucgaggugcaccugcccgacgugcacgagcggaucagcggcgucgaccucggccugccgaacugggggaaguacgugcugcucuccgccggcgcccugaccgcccugaugcugaucaucuuccucaugaccugcuggcgccgggugaaccggagcgagcccacgcagcacaaccugcgcgggaccggccgggaggucuccgugaccccgcagagcgggaagaucaucuccagcugggaguccuacaagagcggcggcgagaccgggcuguga

SEQ ID NO: 224272 - RNA, 1575 nt, Artificial Sequence
  derived and/or modified CDS sequence (opt1) from glycoprotein__RABV__GQ918139.1
auggugccccagguccugcucuucgugcugcugcucggcuucagccugugcuucgggaaguucccgaucuacaccauccccgacgagcugggccccuggucccccaucgacauccaccaccucagcugcccgaacaaccugguggucgaggacgaggggugcaccaaccuguccgaguucagcuacauggagcucaaggugggcuacaucuccgccaucaaggugaacggguucacgugcaccggcgucgugaccgaggccgagaccuacacgaacuucgugggcuacgucaccaccaccuucaagcggaagcacuuccgccccacgcccgacgcgugccgggccgccuacaacuggaagauggccggggacccccgcuacgaggagagccugcacaacccguaccccgacuaccacuggcugcggaccgugcgcaccaccaaggagucccucaucaucaucagccccuccgugacggaccuggaccccuacgacaagagccugcacucccgggucuucccgggcgggaagugcagcggcaucaccguguccagcaccuacugcuccaccaaccacgacuacacgaucuggaugcccgagaacccccgcccgcggaccccgugcgacaucuucaccaacagccgcgggaagcgggccuccaacggcaacaagaccugcggcuucguggacgagcgcgggcucuacaagagccugaagggcgcgugccggcugaagcucugcgggguccugggccugcgccucauggacggcacguggguggccaugcagaccuccgacgagaccaaguggugcccccccgaccagcuggugaaccugcacgacuuccggagcgacgagaucgagcaccucgucguggaggagcuggugaagaagcgcgaggagugccuggacgcccucgagagcaucaugaccacgaaguccgucagcuuccggcgccugucccaccugcggaagcucgugcccggguucggcaaggccuacaccaucuucaacaagacccugauggaggcggacgcccacuacaagagcgugcgcaccuggaacgagaucaucccguccaaggggugccugaaggucggcgggcggugccacccccacgugaacggcgucuucuucaacggcaucauccucgggcccgacgaccacgugcugauccccgagaugcagagcucccugcuccagcagcacauggagcugcugaagagcuccgugaucccgcucaugcacccccuggccgaccccagcacggucuucaaggagggcgacgaggccgaggacuucguggaggugcaccugcccgacgucuacaagcagaucuccgggguggaccucggccugccgaacugggggaaguacgugcugaugaccgccggcgcgaugaucggccucguccugaucuucagccugaugaccuggugccgccgggccaaccggcccgaguccaagcagcgcagcuucgggggcaccgggggcaacguguccgugacgagccaguccgggaaggucauccccagcugggaguccuaccggagcggcggcgagauccgccuguga

SEQ ID NO: 224273 - RNA, 1575 nt, Artificial Sequence
  derived and/or modified CDS sequence (opt1) from glycoprotein__RABV__GU565703.1
auggugccccagguccugcucuucgugccgcugcugggcuucagccucugcuucgggaaguuccccaucuacaccauccccgacaagcugggccccugguccccgaucgacauccaccaccugagcugccccaacaaccucguggucgaggacgaggggugcaccaaccuguccgaguucagcuacauggagcugaaggugggcuacaucuccgccaucaaggugaacggguucacgugcaccggcgucgugaccgaggccgagaccuacacgaacuucgugggcuacgucaccaccaccuucaagcggaagcacuuccgccccacgcccgacgcgugccgggccgccuacaacuggaagauggccggggacccgcgcuacgaggagagccuccacaaccccuaccccgacuaccacuggcugcggaccgugaagaccaccaaggagucccuggugaucaucagccccuccgucacggaccucgacccguacgacaagagccugcacucccgcguguuccccggcgggaacugcagcggcaucaccguguccagcaccuacugcuccaccaaccacgacuacacgaucuggaugccggagaaccugcggcucgggaccagcugcgacaucuucaccaacucccgcggcaagcgggccagcaagggcgggaagaccugcggcuucgucgacgagcgcgggcuguacaagucccugaagggcgcgugcaagcucaagcugugcggcgugcuggggcuccggcugauggacggcacguggguggccaugcagaccagcgacgagaccaaguggugccccccggggcagcuggucaaccuccacgacuuccgcagcgacgagaucgagcaccuggugguggaggagcuggucaagaagcgggaggagugccucgacgcccuggaguccaucaugaccacgaagagcguguccuuccgccggcugagccaccuccgcaagcuggugcccggcuucgggaaggccuacaccaucuucaacaagacccugauggaggcggacgcccacuacaaguccguccggaccuggaacgagaucauccccagcaagggcugccuccgcgugggcgggcggugccacccccacgucaacggcguguucuucaacgggaucauccugggcuccgacgggcacgugcugaucccggagaugcagagcucccuccugcagcagcacauggagcugcucgagagcuccgucaucccccugaugcacccccuggccgaccccagcacgguguucaaggacggcgacgagguggaggacuucgucgaggugcaccucccggacgugcacgagcaggucuccggcguggagcuggggcugcccaacuggggcaaguacgugcucaugaucgccggggcccugaucgcgcugaugcugaucaucuuccucaugaccugcugccgccgggucaaccgccccgagagcacccaguccagccugggcgagaccgggcggaacguguccgugacgagccaguccggcaaggucaucagcagcugggaguccuacaagagcggcggggagacccggcuguga

SEQ ID NO: 224274 - RNA, 1634 nt, Artificial Sequence
  mRNA product Design5 comprising derived and/or modified sequence from glycoprotein__RABV__M13215.1 (CDS wt)
gggagaaagcuuaccaugguuccucaggcucuccuguuuguaccccuucugguuuuuccauuguguuuugggaaauucccuauuuacacgauaccagacaaguugggucccuggagcccgauugacauacaucaccucagcugcccaaacaauuugguaguggaggacgaaggaugcaccaaccugucaggguucuccuacauggaacuuaaaguuggauacaucucagccauaaaaaugaacggguucacuugcacaggcguugugacggaggcugaaaccuacacuaacuucguugguuaugucacaaccacguucaaaagaaagcauuuccgcccaacaccagaugcuuguagagccgcguacaacuggaagauggccggugaccccagauaugaagagucucuacacaauccguacccugacuaccacuggcuucgaacuguaaaaaccaccaaggagucucucguuaucauaucuccaaguguggcagauuuggacccauaugacagaucccuucacucgagggucuucccuggcgggaauugcucaggaguagcggugucuucuaccuacugcuccacuaaccacgauuacaccauuuggaugcccgagaauccgagacuagggaugucuugugacauuuuuaccaauaguagagggaagagagcauccaaagggagugagacuugcggcuuuguagaugaaagaggccuauauaagucuuuaaaaggagcaugcaaacucaaguuauguggaguucuaggacuuagacuuauggauggaacaugggucgcgaugcaaacaucaaaugaaaccaaauggugcccucccggucaguuggugaauuugcacgacuuucgcucagacgaaauugagcaccuuguuguagaggaguuggucaagaagagagaggagugucuggaugcacuagaguccaucaugaccaccaagucagugaguuucagacgucucagucauuuaagaaaacuugucccuggguuuggaaaagcauauaccauauucaacaagaccuugauggaagccgaugcucacuacaagucagucagaacuuggaaugagaucaucccuucaaaaggguguuuaagaguuggggggaggugucauccucauguaaacgggguauuuuucaaugguauuauauuaggaccugacggcaaugucuuaaucccagagaugcaaucaucccuccuccagcaacauauggaguuguugguauccucgguuaucccccuuaugcacccccuggcagacccgucuaccguuuucaagaacggugacgaggcugaggauuuuguugaaguucaccuucccgaugugcacgaacggaucucaggaguugacuugggucucccgaacugggggaaguauguauuacugagugcaggggcccugacugccuugauguugauaauuuuccugaugacaugcuggagaagagucaaucgaucggaaccuacacaacacaaucucagagggacagggagggaggugucagucacuccccaaagcgggaagaucauaucuucaugggaaucauacaagagcgggggugagaccggacugugaggacuaguagaucuaaaaaaaaaaaaaaaaaaaaaaaaaaaaaa

SEQ ID NO: 224275 - RNA, 1792 nt, Artificial Sequence
  mRNA product Design1 comprising derived and/or modified sequence from glycoprotein__RABV__M13215.1 (CDS wt)
gggagaaagcuuaccaugguuccucaggcucuccuguuuguaccccuucugguuuuuccauuguguuuugggaaauucccuauuuacacgauaccagacaaguugggucccuggagcccgauugacauacaucaccucagcugcccaaacaauuugguaguggaggacgaaggaugcaccaaccugucaggguucuccuacauggaacuuaaaguuggauacaucucagccauaaaaaugaacggguucacuugcacaggcguugugacggaggcugaaaccuacacuaacuucguugguuaugucacaaccacguucaaaagaaagcauuuccgcccaacaccagaugcuuguagagccgcguacaacuggaagauggccggugaccccagauaugaagagucucuacacaauccguacccugacuaccacuggcuucgaacuguaaaaaccaccaaggagucucucguuaucauaucuccaaguguggcagauuuggacccauaugacagaucccuucacucgagggucuucccuggcgggaauugcucaggaguagcggugucuucuaccuacugcuccacuaaccacgauuacaccauuuggaugcccgagaauccgagacuagggaugucuugugacauuuuuaccaauaguagagggaagagagcauccaaagggagugagacuugcggcuuuguagaugaaagaggccuauauaagucuuuaaaaggagcaugcaaacucaaguuauguggaguucuaggacuuagacuuauggauggaacaugggucgcgaugcaaacaucaaaugaaaccaaauggugcccucccggucaguuggugaauuugcacgacuuucgcucagacgaaauugagcaccuuguuguagaggaguuggucaagaagagagaggagugucuggaugcacuagaguccaucaugaccaccaagucagugaguuucagacgucucagucauuuaagaaaacuugucccuggguuuggaaaagcauauaccauauucaacaagaccuugauggaagccgaugcucacuacaagucagucagaacuuggaaugagaucaucccuucaaaaggguguuuaagaguuggggggaggugucauccucauguaaacgggguauuuuucaaugguauuauauuaggaccugacggcaaugucuuaaucccagagaugcaaucaucccuccuccagcaacauauggaguuguugguauccucgguuaucccccuuaugcacccccuggcagacccgucuaccguuuucaagaacggugacgaggcugaggauuuuguugaaguucaccuucccgaugugcacgaacggaucucaggaguugacuugggucucccgaacugggggaaguauguauuacugagugcaggggcccugacugccuugauguugauaauuuuccugaugacaugcuggagaagagucaaucgaucggaaccuacacaacacaaucucagagggacagggagggaggugucagucacuccccaaagcgggaagaucauaucuucaugggaaucauacaagagcgggggugagaccggacugugaggacuaguuauaagacugacuagcccgaugggccucccaacgggcccuccuccccuccuugcaccgagauuaauaaaaaaaaaaaaaaaaaaaaaaaaaaaaaaaaaaaaaaaaaaaaaaaaaaaaaaaaaaaaaaaaugcaucccccccccccccccccccccccccccccccaaaggcucuuuucagagccaccagaauu

SEQ ID NO: 224276 - RNA, 1792 nt, Artificial Sequence
  mRNA product Design1 comprising derived and/or modified sequence from glycoprotein__RABV__M13215.1 (CDS opt1) R1803/R2403/CV7201
gggagaaagcuuaccauggugccccaggcccugcucuucgucccgcugcugguguucccccucugcuucggcaaguuccccaucuacaccauccccgacaagcuggggccguggagccccaucgacauccaccaccuguccugccccaacaaccucguggucgaggacgagggcugcaccaaccugagcggguucuccuacauggagcugaaggugggcuacaucagcgccaucaagaugaacggguucacgugcaccggcguggucaccgaggcggagaccuacacgaacuucgugggcuacgugaccaccaccuucaagcggaagcacuuccgccccacgccggacgccugccgggccgccuacaacuggaagauggccggggacccccgcuacgaggagucccuccacaaccccuaccccgacuaccacuggcugcggaccgucaagaccaccaaggagagccuggugaucaucuccccgagcguggcggaccucgaccccuacgaccgcucccugcacagccgggucuuccccggcgggaacugcuccggcguggccgugagcuccacguacugcagcaccaaccacgacuacaccaucuggaugcccgagaacccgcgccuggggauguccugcgacaucuucaccaacagccggggcaagcgcgccuccaagggcagcgagacgugcggguucgucgacgagcggggccucuacaagucccugaagggggccugcaagcugaagcucugcggcgugcugggccugcgccucauggacgggaccuggguggcgaugcagaccagcaacgagaccaaguggugcccccccggccagcuggucaaccugcacgacuuccggagcgacgagaucgagcaccucgugguggaggagcuggucaagaagcgcgaggagugccuggacgcccucgaguccaucaugacgaccaagagcguguccuuccggcgccugagccaccugcggaagcucgugcccggguucggcaaggccuacaccaucuucaacaagacccugauggaggccgacgcccacuacaaguccguccgcacguggaacgagaucaucccgagcaaggggugccugcgggugggcggccgcugccacccccacgucaacgggguguucuucaacggcaucauccucgggcccgacggcaacgugcugauccccgagaugcaguccagccugcuccagcagcacauggagcugcuggucuccagcgugaucccgcucaugcacccccuggcggaccccuccaccguguucaagaacggggacgaggccgaggacuucgucgaggugcaccugcccgacgugcacgagcggaucagcggcgucgaccucggccugccgaacugggggaaguacgugcugcucuccgccggcgcccugaccgcccugaugcugaucaucuuccucaugaccugcuggcgccgggugaaccggagcgagcccacgcagcacaaccugcgcgggaccggccgggaggucuccgugaccccgcagagcgggaagaucaucuccagcugggaguccuacaagagcggcggcgagaccgggcugugaggacuaguuauaagacugacuagcccgaugggccucccaacgggcccuccuccccuccuugcaccgagauuaauaaaaaaaaaaaaaaaaaaaaaaaaaaaaaaaaaaaaaaaaaaaaaaaaaaaaaaaaaaaaaaaaugcaucccccccccccccccccccccccccccccccaaaggcucuuuucagagccaccagaauu

SEQ ID NO: 224277 - RNA, 1792 nt, Artificial Sequence
  mRNA product Design1 comprising derived and/or modified sequence from glycoprotein__RABV__GQ918139.1 (CDS opt1) R2300
gggagaaagcuuaccauggugccccagguccugcucuucgugcugcugcucggcuucagccugugcuucgggaaguucccgaucuacaccauccccgacgagcugggccccuggucccccaucgacauccaccaccucagcugcccgaacaaccugguggucgaggacgaggggugcaccaaccuguccgaguucagcuacauggagcucaaggugggcuacaucuccgccaucaaggugaacggguucacgugcaccggcgucgugaccgaggccgagaccuacacgaacuucgugggcuacgucaccaccaccuucaagcggaagcacuuccgccccacgcccgacgcgugccgggccgccuacaacuggaagauggccggggacccccgcuacgaggagagccugcacaacccguaccccgacuaccacuggcugcggaccgugcgcaccaccaaggagucccucaucaucaucagccccuccgugacggaccuggaccccuacgacaagagccugcacucccgggucuucccgggcgggaagugcagcggcaucaccguguccagcaccuacugcuccaccaaccacgacuacacgaucuggaugcccgagaacccccgcccgcggaccccgugcgacaucuucaccaacagccgcgggaagcgggccuccaacggcaacaagaccugcggcuucguggacgagcgcgggcucuacaagagccugaagggcgcgugccggcugaagcucugcgggguccugggccugcgccucauggacggcacguggguggccaugcagaccuccgacgagaccaaguggugcccccccgaccagcuggugaaccugcacgacuuccggagcgacgagaucgagcaccucgucguggaggagcuggugaagaagcgcgaggagugccuggacgcccucgagagcaucaugaccacgaaguccgucagcuuccggcgccugucccaccugcggaagcucgugcccggguucggcaaggccuacaccaucuucaacaagacccugauggaggcggacgcccacuacaagagcgugcgcaccuggaacgagaucaucccguccaaggggugccugaaggucggcgggcggugccacccccacgugaacggcgucuucuucaacggcaucauccucgggcccgacgaccacgugcugauccccgagaugcagagcucccugcuccagcagcacauggagcugcugaagagcuccgugaucccgcucaugcacccccuggccgaccccagcacggucuucaaggagggcgacgaggccgaggacuucguggaggugcaccugcccgacgucuacaagcagaucuccgggguggaccucggccugccgaacugggggaaguacgugcugaugaccgccggcgcgaugaucggccucguccugaucuucagccugaugaccuggugccgccgggccaaccggcccgaguccaagcagcgcagcuucgggggcaccgggggcaacguguccgugacgagccaguccgggaaggucauccccagcugggaguccuaccggagcggcggcgagauccgccugugaggacuaguuauaagacugacuagcccgaugggccucccaacgggcccuccuccccuccuugcaccgagauuaauaaaaaaaaaaaaaaaaaaaaaaaaaaaaaaaaaaaaaaaaaaaaaaaaaaaaaaaaaaaaaaaaugcaucccccccccccccccccccccccccccccccaaaggcucuuuucagagccaccagaauu

SEQ ID NO: 224278 - RNA, 1792 nt, Artificial Sequence
  mRNA product Design1 comprising derived and/or modified sequence from glycoprotein__RABV__GU565703.1 (CDS opt1) R2302
gggagaaagcuuaccauggugccccagguccugcucuucgugccgcugcugggcuucagccucugcuucgggaaguuccccaucuacaccauccccgacaagcugggccccugguccccgaucgacauccaccaccugagcugccccaacaaccucguggucgaggacgaggggugcaccaaccuguccgaguucagcuacauggagcugaaggugggcuacaucuccgccaucaaggugaacggguucacgugcaccggcgucgugaccgaggccgagaccuacacgaacuucgugggcuacgucaccaccaccuucaagcggaagcacuuccgccccacgcccgacgcgugccgggccgccuacaacuggaagauggccggggacccgcgcuacgaggagagccuccacaaccccuaccccgacuaccacuggcugcggaccgugaagaccaccaaggagucccuggugaucaucagccccuccgucacggaccucgacccguacgacaagagccugcacucccgcguguuccccggcgggaacugcagcggcaucaccguguccagcaccuacugcuccaccaaccacgacuacacgaucuggaugccggagaaccugcggcucgggaccagcugcgacaucuucaccaacucccgcggcaagcgggccagcaagggcgggaagaccugcggcuucgucgacgagcgcgggcuguacaagucccugaagggcgcgugcaagcucaagcugugcggcgugcuggggcuccggcugauggacggcacguggguggccaugcagaccagcgacgagaccaaguggugccccccggggcagcuggucaaccuccacgacuuccgcagcgacgagaucgagcaccuggugguggaggagcuggucaagaagcgggaggagugccucgacgcccuggaguccaucaugaccacgaagagcguguccuuccgccggcugagccaccuccgcaagcuggugcccggcuucgggaaggccuacaccaucuucaacaagacccugauggaggcggacgcccacuacaaguccguccggaccuggaacgagaucauccccagcaagggcugccuccgcgugggcgggcggugccacccccacgucaacggcguguucuucaacgggaucauccugggcuccgacgggcacgugcugaucccggagaugcagagcucccuccugcagcagcacauggagcugcucgagagcuccgucaucccccugaugcacccccuggccgaccccagcacgguguucaaggacggcgacgagguggaggacuucgucgaggugcaccucccggacgugcacgagcaggucuccggcguggagcuggggcugcccaacuggggcaaguacgugcucaugaucgccggggcccugaucgcgcugaugcugaucaucuuccucaugaccugcugccgccgggucaaccgccccgagagcacccaguccagccugggcgagaccgggcggaacguguccgugacgagccaguccggcaaggucaucagcagcugggaguccuacaagagcggcggggagacccggcugugaggacuaguuauaagacugacuagcccgaugggccucccaacgggcccuccuccccuccuugcaccgagauuaauaaaaaaaaaaaaaaaaaaaaaaaaaaaaaaaaaaaaaaaaaaaaaaaaaaaaaaaaaaaaaaaaugcaucccccccccccccccccccccccccccccccaaaggcucuuuucagagccaccagaauu

SEQ ID NO: 224279 - RNA, 1957 nt, Artificial Sequence
  mRNA product Design2 comprising derived and/or modified sequence from glycoprotein__RABV__M13215.1 (CDS wt)
ggggcgcugccuacggagguggcagccaucuccuucucggcaucaagcuuaccaugguuccucaggcucuccuguuuguaccccuucugguuuuuccauuguguuuugggaaauucccuauuuacacgauaccagacaaguugggucccuggagcccgauugacauacaucaccucagcugcccaaacaauuugguaguggaggacgaaggaugcaccaaccugucaggguucuccuacauggaacuuaaaguuggauacaucucagccauaaaaaugaacggguucacuugcacaggcguugugacggaggcugaaaccuacacuaacuucguugguuaugucacaaccacguucaaaagaaagcauuuccgcccaacaccagaugcuuguagagccgcguacaacuggaagauggccggugaccccagauaugaagagucucuacacaauccguacccugacuaccacuggcuucgaacuguaaaaaccaccaaggagucucucguuaucauaucuccaaguguggcagauuuggacccauaugacagaucccuucacucgagggucuucccuggcgggaauugcucaggaguagcggugucuucuaccuacugcuccacuaaccacgauuacaccauuuggaugcccgagaauccgagacuagggaugucuugugacauuuuuaccaauaguagagggaagagagcauccaaagggagugagacuugcggcuuuguagaugaaagaggccuauauaagucuuuaaaaggagcaugcaaacucaaguuauguggaguucuaggacuuagacuuauggauggaacaugggucgcgaugcaaacaucaaaugaaaccaaauggugcccucccggucaguuggugaauuugcacgacuuucgcucagacgaaauugagcaccuuguuguagaggaguuggucaagaagagagaggagugucuggaugcacuagaguccaucaugaccaccaagucagugaguuucagacgucucagucauuuaagaaaacuugucccuggguuuggaaaagcauauaccauauucaacaagaccuugauggaagccgaugcucacuacaagucagucagaacuuggaaugagaucaucccuucaaaaggguguuuaagaguuggggggaggugucauccucauguaaacgggguauuuuucaaugguauuauauuaggaccugacggcaaugucuuaaucccagagaugcaaucaucccuccuccagcaacauauggaguuguugguauccucgguuaucccccuuaugcacccccuggcagacccgucuaccguuuucaagaacggugacgaggcugaggauuuuguugaaguucaccuucccgaugugcacgaacggaucucaggaguugacuugggucucccgaacugggggaaguauguauuacugagugcaggggcccugacugccuugauguugauaauuuuccugaugacaugcuggagaagagucaaucgaucggaaccuacacaacacaaucucagagggacagggagggaggugucagucacuccccaaagcgggaagaucauaucuucaugggaaucauacaagagcgggggugagaccggacugugaggacuagugcaucacauuuaaaagcaucucagccuaccaugagaauaagagaaagaaaaugaagaucaauagcuuauucaucucuuuuucuuuuucguugguguaaagccaacacccugucuaaaaaacauaaauuucuuuaaucauuuugccucuuuucucugugcuucaauuaauaaaaaauggaaagaaccuagaucuaaaaaaaaaaaaaaaaaaaaaaaaaaaaaaaaaaaaaaaaaaaaaaaaaaaaaaaaaaaaaaaaugcaucccccccccccccccccccccccccccccccaaaggcucuuuucagagccaccagaauu

SEQ ID NO: 224280 - RNA, 1957 nt, Artificial Sequence
  mRNA product Design2 comprising derived and/or modified sequence from glycoprotein__RABV__M13215.1 (CDS opt1) R2506/R2507
ggggcgcugccuacggagguggcagccaucuccuucucggcaucaagcuuaccauggugccccaggcccugcucuucgucccgcugcugguguucccccucugcuucggcaaguuccccaucuacaccauccccgacaagcuggggccguggagccccaucgacauccaccaccuguccugccccaacaaccucguggucgaggacgagggcugcaccaaccugagcggguucuccuacauggagcugaaggugggcuacaucagcgccaucaagaugaacggguucacgugcaccggcguggucaccgaggcggagaccuacacgaacuucgugggcuacgugaccaccaccuucaagcggaagcacuuccgccccacgccggacgccugccgggccgccuacaacuggaagauggccggggacccccgcuacgaggagucccuccacaaccccuaccccgacuaccacuggcugcggaccgucaagaccaccaaggagagccuggugaucaucuccccgagcguggcggaccucgaccccuacgaccgcucccugcacagccgggucuuccccggcgggaacugcuccggcguggccgugagcuccacguacugcagcaccaaccacgacuacaccaucuggaugcccgagaacccgcgccuggggauguccugcgacaucuucaccaacagccggggcaagcgcgccuccaagggcagcgagacgugcggguucgucgacgagcggggccucuacaagucccugaagggggccugcaagcugaagcucugcggcgugcugggccugcgccucauggacgggaccuggguggcgaugcagaccagcaacgagaccaaguggugcccccccggccagcuggucaaccugcacgacuuccggagcgacgagaucgagcaccucgugguggaggagcuggucaagaagcgcgaggagugccuggacgcccucgaguccaucaugacgaccaagagcguguccuuccggcgccugagccaccugcggaagcucgugcccggguucggcaaggccuacaccaucuucaacaagacccugauggaggccgacgcccacuacaaguccguccgcacguggaacgagaucaucccgagcaaggggugccugcgggugggcggccgcugccacccccacgucaacgggguguucuucaacggcaucauccucgggcccgacggcaacgugcugauccccgagaugcaguccagccugcuccagcagcacauggagcugcuggucuccagcgugaucccgcucaugcacccccuggcggaccccuccaccguguucaagaacggggacgaggccgaggacuucgucgaggugcaccugcccgacgugcacgagcggaucagcggcgucgaccucggccugccgaacugggggaaguacgugcugcucuccgccggcgcccugaccgcccugaugcugaucaucuuccucaugaccugcuggcgccgggugaaccggagcgagcccacgcagcacaaccugcgcgggaccggccgggaggucuccgugaccccgcagagcgggaagaucaucuccagcugggaguccuacaagagcggcggcgagaccgggcugugaggacuagugcaucacauuuaaaagcaucucagccuaccaugagaauaagagaaagaaaaugaagaucaauagcuuauucaucucuuuuucuuuuucguugguguaaagccaacacccugucuaaaaaacauaaauuucuuuaaucauuuugccucuuuucucugugcuucaauuaauaaaaaauggaaagaaccuagaucuaaaaaaaaaaaaaaaaaaaaaaaaaaaaaaaaaaaaaaaaaaaaaaaaaaaaaaaaaaaaaaaaugcaucccccccccccccccccccccccccccccccaaaggcucuuuucagagccaccagaauu

SEQ ID NO: 224281 - RNA, 1957 nt, Artificial Sequence
  mRNA product Design2 comprising derived and/or modified sequence from glycoprotein__RABV__GQ918139.1 (CDS opt1)
ggggcgcugccuacggagguggcagccaucuccuucucggcaucaagcuuaccauggugccccagguccugcucuucgugcugcugcucggcuucagccugugcuucgggaaguucccgaucuacaccauccccgacgagcugggccccuggucccccaucgacauccaccaccucagcugcccgaacaaccugguggucgaggacgaggggugcaccaaccuguccgaguucagcuacauggagcucaaggugggcuacaucuccgccaucaaggugaacggguucacgugcaccggcgucgugaccgaggccgagaccuacacgaacuucgugggcuacgucaccaccaccuucaagcggaagcacuuccgccccacgcccgacgcgugccgggccgccuacaacuggaagauggccggggacccccgcuacgaggagagccugcacaacccguaccccgacuaccacuggcugcggaccgugcgcaccaccaaggagucccucaucaucaucagccccuccgugacggaccuggaccccuacgacaagagccugcacucccgggucuucccgggcgggaagugcagcggcaucaccguguccagcaccuacugcuccaccaaccacgacuacacgaucuggaugcccgagaacccccgcccgcggaccccgugcgacaucuucaccaacagccgcgggaagcgggccuccaacggcaacaagaccugcggcuucguggacgagcgcgggcucuacaagagccugaagggcgcgugccggcugaagcucugcgggguccugggccugcgccucauggacggcacguggguggccaugcagaccuccgacgagaccaaguggugcccccccgaccagcuggugaaccugcacgacuuccggagcgacgagaucgagcaccucgucguggaggagcuggugaagaagcgcgaggagugccuggacgcccucgagagcaucaugaccacgaaguccgucagcuuccggcgccugucccaccugcggaagcucgugcccggguucggcaaggccuacaccaucuucaacaagacccugauggaggcggacgcccacuacaagagcgugcgcaccuggaacgagaucaucccguccaaggggugccugaaggucggcgggcggugccacccccacgugaacggcgucuucuucaacggcaucauccucgggcccgacgaccacgugcugauccccgagaugcagagcucccugcuccagcagcacauggagcugcugaagagcuccgugaucccgcucaugcacccccuggccgaccccagcacggucuucaaggagggcgacgaggccgaggacuucguggaggugcaccugcccgacgucuacaagcagaucuccgggguggaccucggccugccgaacugggggaaguacgugcugaugaccgccggcgcgaugaucggccucguccugaucuucagccugaugaccuggugccgccgggccaaccggcccgaguccaagcagcgcagcuucgggggcaccgggggcaacguguccgugacgagccaguccgggaaggucauccccagcugggaguccuaccggagcggcggcgagauccgccugugaggacuagugcaucacauuuaaaagcaucucagccuaccaugagaauaagagaaagaaaaugaagaucaauagcuuauucaucucuuuuucuuuuucguugguguaaagccaacacccugucuaaaaaacauaaauuucuuuaaucauuuugccucuuuucucugugcuucaauuaauaaaaaauggaaagaaccuagaucuaaaaaaaaaaaaaaaaaaaaaaaaaaaaaaaaaaaaaaaaaaaaaaaaaaaaaaaaaaaaaaaaugcaucccccccccccccccccccccccccccccccaaaggcucuuuucagagccaccagaauu

SEQ ID NO: 224282 - RNA, 1957 nt, Artificial Sequence
  mRNA product Design2 comprising derived and/or modified sequence from glycoprotein__RABV__GU565703.1 (CDS opt1)
ggggcgcugccuacggagguggcagccaucuccuucucggcaucaagcuuaccauggugccccagguccugcucuucgugccgcugcugggcuucagccucugcuucgggaaguuccccaucuacaccauccccgacaagcugggccccugguccccgaucgacauccaccaccugagcugccccaacaaccucguggucgaggacgaggggugcaccaaccuguccgaguucagcuacauggagcugaaggugggcuacaucuccgccaucaaggugaacggguucacgugcaccggcgucgugaccgaggccgagaccuacacgaacuucgugggcuacgucaccaccaccuucaagcggaagcacuuccgccccacgcccgacgcgugccgggccgccuacaacuggaagauggccggggacccgcgcuacgaggagagccuccacaaccccuaccccgacuaccacuggcugcggaccgugaagaccaccaaggagucccuggugaucaucagccccuccgucacggaccucgacccguacgacaagagccugcacucccgcguguuccccggcgggaacugcagcggcaucaccguguccagcaccuacugcuccaccaaccacgacuacacgaucuggaugccggagaaccugcggcucgggaccagcugcgacaucuucaccaacucccgcggcaagcgggccagcaagggcgggaagaccugcggcuucgucgacgagcgcgggcuguacaagucccugaagggcgcgugcaagcucaagcugugcggcgugcuggggcuccggcugauggacggcacguggguggccaugcagaccagcgacgagaccaaguggugccccccggggcagcuggucaaccuccacgacuuccgcagcgacgagaucgagcaccuggugguggaggagcuggucaagaagcgggaggagugccucgacgcccuggaguccaucaugaccacgaagagcguguccuuccgccggcugagccaccuccgcaagcuggugcccggcuucgggaaggccuacaccaucuucaacaagacccugauggaggcggacgcccacuacaaguccguccggaccuggaacgagaucauccccagcaagggcugccuccgcgugggcgggcggugccacccccacgucaacggcguguucuucaacgggaucauccugggcuccgacgggcacgugcugaucccggagaugcagagcucccuccugcagcagcacauggagcugcucgagagcuccgucaucccccugaugcacccccuggccgaccccagcacgguguucaaggacggcgacgagguggaggacuucgucgaggugcaccucccggacgugcacgagcaggucuccggcguggagcuggggcugcccaacuggggcaaguacgugcucaugaucgccggggcccugaucgcgcugaugcugaucaucuuccucaugaccugcugccgccgggucaaccgccccgagagcacccaguccagccugggcgagaccgggcggaacguguccgugacgagccaguccggcaaggucaucagcagcugggaguccuacaagagcggcggggagacccggcugugaggacuagugcaucacauuuaaaagcaucucagccuaccaugagaauaagagaaagaaaaugaagaucaauagcuuauucaucucuuuuucuuuuucguugguguaaagccaacacccugucuaaaaaacauaaauuucuuuaaucauuuugccucuuuucucugugcuucaauuaauaaaaaauggaaagaaccuagaucuaaaaaaaaaaaaaaaaaaaaaaaaaaaaaaaaaaaaaaaaaaaaaaaaaaaaaaaaaaaaaaaaugcaucccccccccccccccccccccccccccccccaaaggcucuuuucagagccaccagaauu

SEQ ID NO: 224283 - RNA, 3673 nt, Artificial Sequence
  mRNA product Design2 comprising derived and/or modified sequence from RAV-G_F2Amod1_PpLuc (CDS opt1)  R2757/R2758
ggggcgcugccuacggagguggcagccaucuccuucucggcaucaagcuuaccauggugccccaggcccugcucuucgucccgcugcugguguucccccucugcuucggcaaguuccccaucuacaccauccccgacaagcuggggccguggagccccaucgacauccaccaccuguccugccccaacaaccucguggucgaggacgagggcugcaccaaccugagcggguucuccuacauggagcugaaggugggcuacaucagcgccaucaagaugaacggguucacgugcaccggcguggucaccgaggcggagaccuacacgaacuucgugggcuacgugaccaccaccuucaagcggaagcacuuccgccccacgccggacgccugccgggccgccuacaacuggaagauggccggggacccccgcuacgaggagucccuccacaaccccuaccccgacuaccacuggcugcggaccgucaagaccaccaaggagagccuggugaucaucuccccgagcguggcggaccucgaccccuacgaccgcucccugcacagccgggucuuccccggcgggaacugcuccggcguggccgugagcuccacguacugcagcaccaaccacgacuacaccaucuggaugcccgagaacccgcgccuggggauguccugcgacaucuucaccaacagccggggcaagcgcgccuccaagggcagcgagacgugcggguucgucgacgagcggggccucuacaagucccugaagggggccugcaagcugaagcucugcggcgugcugggccugcgccucauggacgggaccuggguggcgaugcagaccagcaacgagaccaaguggugcccccccggccagcuggucaaccugcacgacuuccggagcgacgagaucgagcaccucgugguggaggagcuggucaagaagcgcgaggagugccuggacgcccucgaguccaucaugacgaccaagagcguguccuuccggcgccugagccaccugcggaagcucgugcccggguucggcaaggccuacaccaucuucaacaagacccugauggaggccgacgcccacuacaaguccguccgcacguggaacgagaucaucccgagcaaggggugccugcgggugggcggccgcugccacccccacgucaacgggguguucuucaacggcaucauccucgggcccgacggcaacgugcugauccccgagaugcaguccagccugcuccagcagcacauggagcugcuggucuccagcgugaucccgcucaugcacccccuggcggaccccuccaccguguucaagaacggggacgaggccgaggacuucgucgaggugcaccugcccgacgugcacgagcggaucagcggcgucgaccucggccugccgaacugggggaaguacgugcugcucuccgccggcgcccugaccgcccugaugcugaucaucuuccucaugaccugcuggcgccgggugaaccggagcgagcccacgcagcacaaccugcgcgggaccggccgggaggucuccgugaccccgcagagcgggaagaucaucuccagcugggaguccuacaagagcggcggcgagaccgggcuggugaagcagacacucaauuucgaccuucugaaguuggcuggagauguugagucuaacccaggccccauggaggacgccaagaacaucaagaagggcccggcgcccuucuacccgcuggaggacgggaccgccggcgagcagcuccacaaggccaugaagcgguacgcccuggugccgggcacgaucgccuucaccgacgcccacaucgaggucgacaucaccuacgcggaguacuucgagaugagcgugcgccuggccgaggccaugaagcgguacggccugaacaccaaccaccggaucguggugugcucggagaacagccugcaguucuucaugccggugcugggcgcccucuucaucggcguggccgucgccccggcgaacgacaucuacaacgagcgggagcugcugaacagcauggggaucagccagccgaccgugguguucgugagcaagaagggccugcagaagauccugaacgugcagaagaagcugcccaucauccagaagaucaucaucauggacagcaagaccgacuaccagggcuuccagucgauguacacguucgugaccagccaccucccgccgggcuucaacgaguacgacuucgucccggagagcuucgaccgggacaagaccaucgcccugaucaugaacagcagcggcagcaccggccugccgaaggggguggcccugccgcaccggaccgccugcgugcgcuucucgcacgcccgggaccccaucuucggcaaccagaucaucccggacaccgccauccugagcguggugccguuccaccacggcuucggcauguucacgacccugggcuaccucaucugcggcuuccgggugguccugauguaccgguucgaggaggagcuguuccugcggagccugcaggacuacaagauccagagcgcgcugcucgugccgacccuguucagcuucuucgccaagagcacccugaucgacaaguacgaccugucgaaccugcacgagaucgccagcgggggcgccccgcugagcaaggaggugggcgaggccguggccaagcgguuccaccucccgggcauccgccagggcuacggccugaccgagaccacgagcgcgauccugaucacccccgagggggacgacaagccgggcgccgugggcaagguggucccguucuucgaggccaaggugguggaccuggacaccggcaagacccugggcgugaaccagcggggcgagcugugcgugcgggggccgaugaucaugagcggcuacgugaacaacccggaggccaccaacgcccucaucgacaaggacggcuggcugcacagcggcgacaucgccuacugggacgaggacgagcacuucuucaucgucgaccggcugaagucgcugaucaaguacaagggcuaccagguggcgccggccgagcuggagagcauccugcuccagcaccccaacaucuucgacgccggcguggccgggcugccggacgacgacgccggcgagcugccggccgcggugguggugcuggagcacggcaagaccaugacggagaaggagaucgucgacuacguggccagccaggugaccaccgccaagaagcugcggggcggcgugguguucguggacgaggucccgaagggccugaccgggaagcucgacgcccggaagauccgcgagauccugaucaaggccaagaagggcggcaagaucgccgugugaggacuagugcaucacauuuaaaagcaucucagccuaccaugagaauaagagaaagaaaaugaagaucaauagcuuauucaucucuuuuucuuuuucguugguguaaagccaacacccugucuaaaaaacauaaauuucuuuaaucauuuugccucuuuucucugugcuucaauuaauaaaaaauggaaagaaccuagaucuaaaaaaaaaaaaaaaaaaaaaaaaaaaaaaaaaaaaaaaaaaaaaaaaaaaaaaaaaaaaaaaaugcaucccccccccccccccccccccccccccccccaaaggcucuuuucagagccaccagaauu

SEQ ID NO: 224284 - RNA, 3607 nt, Artificial Sequence
  mRNA product Design2 comprising derived and/or modified sequence from RAV-G_PpLuc (CDS opt1) R2759/R2760
ggggcgcugccuacggagguggcagccaucuccuucucggcaucaagcuuaccauggugccccaggcccugcucuucgucccgcugcugguguucccccucugcuucggcaaguuccccaucuacaccauccccgacaagcuggggccguggagccccaucgacauccaccaccuguccugccccaacaaccucguggucgaggacgagggcugcaccaaccugagcggguucuccuacauggagcugaaggugggcuacaucagcgccaucaagaugaacggguucacgugcaccggcguggucaccgaggcggagaccuacacgaacuucgugggcuacgugaccaccaccuucaagcggaagcacuuccgccccacgccggacgccugccgggccgccuacaacuggaagauggccggggacccccgcuacgaggagucccuccacaaccccuaccccgacuaccacuggcugcggaccgucaagaccaccaaggagagccuggugaucaucuccccgagcguggcggaccucgaccccuacgaccgcucccugcacagccgggucuuccccggcgggaacugcuccggcguggccgugagcuccacguacugcagcaccaaccacgacuacaccaucuggaugcccgagaacccgcgccuggggauguccugcgacaucuucaccaacagccggggcaagcgcgccuccaagggcagcgagacgugcggguucgucgacgagcggggccucuacaagucccugaagggggccugcaagcugaagcucugcggcgugcugggccugcgccucauggacgggaccuggguggcgaugcagaccagcaacgagaccaaguggugcccccccggccagcuggucaaccugcacgacuuccggagcgacgagaucgagcaccucgugguggaggagcuggucaagaagcgcgaggagugccuggacgcccucgaguccaucaugacgaccaagagcguguccuuccggcgccugagccaccugcggaagcucgugcccggguucggcaaggccuacaccaucuucaacaagacccugauggaggccgacgcccacuacaaguccguccgcacguggaacgagaucaucccgagcaaggggugccugcgggugggcggccgcugccacccccacgucaacgggguguucuucaacggcaucauccucgggcccgacggcaacgugcugauccccgagaugcaguccagccugcuccagcagcacauggagcugcuggucuccagcgugaucccgcucaugcacccccuggcggaccccuccaccguguucaagaacggggacgaggccgaggacuucgucgaggugcaccugcccgacgugcacgagcggaucagcggcgucgaccucggccugccgaacugggggaaguacgugcugcucuccgccggcgcccugaccgcccugaugcugaucaucuuccucaugaccugcuggcgccgggugaaccggagcgagcccacgcagcacaaccugcgcgggaccggccgggaggucuccgugaccccgcagagcgggaagaucaucuccagcugggaguccuacaagagcggcggcgagaccgggcugauggaggacgccaagaacaucaagaagggcccggcgcccuucuacccgcuggaggacgggaccgccggcgagcagcuccacaaggccaugaagcgguacgcccuggugccgggcacgaucgccuucaccgacgcccacaucgaggucgacaucaccuacgcggaguacuucgagaugagcgugcgccuggccgaggccaugaagcgguacggccugaacaccaaccaccggaucguggugugcucggagaacagccugcaguucuucaugccggugcugggcgcccucuucaucggcguggccgucgccccggcgaacgacaucuacaacgagcgggagcugcugaacagcauggggaucagccagccgaccgugguguucgugagcaagaagggccugcagaagauccugaacgugcagaagaagcugcccaucauccagaagaucaucaucauggacagcaagaccgacuaccagggcuuccagucgauguacacguucgugaccagccaccucccgccgggcuucaacgaguacgacuucgucccggagagcuucgaccgggacaagaccaucgcccugaucaugaacagcagcggcagcaccggccugccgaaggggguggcccugccgcaccggaccgccugcgugcgcuucucgcacgcccgggaccccaucuucggcaaccagaucaucccggacaccgccauccugagcguggugccguuccaccacggcuucggcauguucacgacccugggcuaccucaucugcggcuuccgggugguccugauguaccgguucgaggaggagcuguuccugcggagccugcaggacuacaagauccagagcgcgcugcucgugccgacccuguucagcuucuucgccaagagcacccugaucgacaaguacgaccugucgaaccugcacgagaucgccagcgggggcgccccgcugagcaaggaggugggcgaggccguggccaagcgguuccaccucccgggcauccgccagggcuacggccugaccgagaccacgagcgcgauccugaucacccccgagggggacgacaagccgggcgccgugggcaagguggucccguucuucgaggccaaggugguggaccuggacaccggcaagacccugggcgugaaccagcggggcgagcugugcgugcgggggccgaugaucaugagcggcuacgugaacaacccggaggccaccaacgcccucaucgacaaggacggcuggcugcacagcggcgacaucgccuacugggacgaggacgagcacuucuucaucgucgaccggcugaagucgcugaucaaguacaagggcuaccagguggcgccggccgagcuggagagcauccugcuccagcaccccaacaucuucgacgccggcguggccgggcugccggacgacgacgccggcgagcugccggccgcggugguggugcuggagcacggcaagaccaugacggagaaggagaucgucgacuacguggccagccaggugaccaccgccaagaagcugcggggcggcgugguguucguggacgaggucccgaagggccugaccgggaagcucgacgcccggaagauccgcgagauccugaucaaggccaagaagggcggcaagaucgccgugugaggacuagugcaucacauuuaaaagcaucucagccuaccaugagaauaagagaaagaaaaugaagaucaauagcuuauucaucucuuuuucuuuuucguugguguaaagccaacacccugucuaaaaaacauaaauuucuuuaaucauuuugccucuuuucucugugcuucaauuaauaaaaaauggaaagaaccuagaucuaaaaaaaaaaaaaaaaaaaaaaaaaaaaaaaaaaaaaaaaaaaaaaaaaaaaaaaaaaaaaaaaugcaucccccccccccccccccccccccccccccccaaaggcucuuuucagagccaccagaauu

SEQ ID NO: 224285 - RNA, 1870 nt, Artificial Sequence
  mRNA product Design1 comprising derived and/or modified sequence from luciferase__Photinus pyralis (CDS opt1) R1265/R2569
gggagaaagcuugaggauggaggacgccaagaacaucaagaagggcccggcgcccuucuacccgcuggaggacgggaccgccggcgagcagcuccacaaggccaugaagcgguacgcccuggugccgggcacgaucgccuucaccgacgcccacaucgaggucgacaucaccuacgcggaguacuucgagaugagcgugcgccuggccgaggccaugaagcgguacggccugaacaccaaccaccggaucguggugugcucggagaacagccugcaguucuucaugccggugcugggcgcccucuucaucggcguggccgucgccccggcgaacgacaucuacaacgagcgggagcugcugaacagcauggggaucagccagccgaccgugguguucgugagcaagaagggccugcagaagauccugaacgugcagaagaagcugcccaucauccagaagaucaucaucauggacagcaagaccgacuaccagggcuuccagucgauguacacguucgugaccagccaccucccgccgggcuucaacgaguacgacuucgucccggagagcuucgaccgggacaagaccaucgcccugaucaugaacagcagcggcagcaccggccugccgaaggggguggcccugccgcaccggaccgccugcgugcgcuucucgcacgcccgggaccccaucuucggcaaccagaucaucccggacaccgccauccugagcguggugccguuccaccacggcuucggcauguucacgacccugggcuaccucaucugcggcuuccgggugguccugauguaccgguucgaggaggagcuguuccugcggagccugcaggacuacaagauccagagcgcgcugcucgugccgacccuguucagcuucuucgccaagagcacccugaucgacaaguacgaccugucgaaccugcacgagaucgccagcgggggcgccccgcugagcaaggaggugggcgaggccguggccaagcgguuccaccucccgggcauccgccagggcuacggccugaccgagaccacgagcgcgauccugaucacccccgagggggacgacaagccgggcgccgugggcaagguggucccguucuucgaggccaaggugguggaccuggacaccggcaagacccugggcgugaaccagcggggcgagcugugcgugcgggggccgaugaucaugagcggcuacgugaacaacccggaggccaccaacgcccucaucgacaaggacggcuggcugcacagcggcgacaucgccuacugggacgaggacgagcacuucuucaucgucgaccggcugaagucgcugaucaaguacaagggcuaccagguggcgccggccgagcuggagagcauccugcuccagcaccccaacaucuucgacgccggcguggccgggcugccggacgacgacgccggcgagcugccggccgcggugguggugcuggagcacggcaagaccaugacggagaaggagaucgucgacuacguggccagccaggugaccaccgccaagaagcugcggggcggcgugguguucguggacgaggucccgaagggccugaccgggaagcucgacgcccggaagauccgcgagauccugaucaaggccaagaagggcggcaagaucgccguguaagacuaguuauaagacugacuagcccgaugggccucccaacgggcccuccuccccuccuugcaccgagauuaauaaaaaaaaaaaaaaaaaaaaaaaaaaaaaaaaaaaaaaaaaaaaaaaaaaaaaaaaaaaaaaaaugcaucccccccccccccccccccccccccccccccaaaggcucuuuucagagccaccagaauu

SEQ ID NO: 224286 - RNA, 2035 nt, Artificial Sequence
  mRNA product Design2 comprising derived and/or modified sequence from luciferase__Photinus pyralis (CDS opt1) R2244/R2667 /R2902
ggggcgcugccuacggagguggcagccaucuccuucucggcaucaagcuugaggauggaggacgccaagaacaucaagaagggcccggcgcccuucuacccgcuggaggacgggaccgccggcgagcagcuccacaaggccaugaagcgguacgcccuggugccgggcacgaucgccuucaccgacgcccacaucgaggucgacaucaccuacgcggaguacuucgagaugagcgugcgccuggccgaggccaugaagcgguacggccugaacaccaaccaccggaucguggugugcucggagaacagccugcaguucuucaugccggugcugggcgcccucuucaucggcguggccgucgccccggcgaacgacaucuacaacgagcgggagcugcugaacagcauggggaucagccagccgaccgugguguucgugagcaagaagggccugcagaagauccugaacgugcagaagaagcugcccaucauccagaagaucaucaucauggacagcaagaccgacuaccagggcuuccagucgauguacacguucgugaccagccaccucccgccgggcuucaacgaguacgacuucgucccggagagcuucgaccgggacaagaccaucgcccugaucaugaacagcagcggcagcaccggccugccgaaggggguggcccugccgcaccggaccgccugcgugcgcuucucgcacgcccgggaccccaucuucggcaaccagaucaucccggacaccgccauccugagcguggugccguuccaccacggcuucggcauguucacgacccugggcuaccucaucugcggcuuccgggugguccugauguaccgguucgaggaggagcuguuccugcggagccugcaggacuacaagauccagagcgcgcugcucgugccgacccuguucagcuucuucgccaagagcacccugaucgacaaguacgaccugucgaaccugcacgagaucgccagcgggggcgccccgcugagcaaggaggugggcgaggccguggccaagcgguuccaccucccgggcauccgccagggcuacggccugaccgagaccacgagcgcgauccugaucacccccgagggggacgacaagccgggcgccgugggcaagguggucccguucuucgaggccaaggugguggaccuggacaccggcaagacccugggcgugaaccagcggggcgagcugugcgugcgggggccgaugaucaugagcggcuacgugaacaacccggaggccaccaacgcccucaucgacaaggacggcuggcugcacagcggcgacaucgccuacugggacgaggacgagcacuucuucaucgucgaccggcugaagucgcugaucaaguacaagggcuaccagguggcgccggccgagcuggagagcauccugcuccagcaccccaacaucuucgacgccggcguggccgggcugccggacgacgacgccggcgagcugccggccgcggugguggugcuggagcacggcaagaccaugacggagaaggagaucgucgacuacguggccagccaggugaccaccgccaagaagcugcggggcggcgugguguucguggacgaggucccgaagggccugaccgggaagcucgacgcccggaagauccgcgagauccugaucaaggccaagaagggcggcaagaucgccguguaagacuagugcaucacauuuaaaagcaucucagccuaccaugagaauaagagaaagaaaaugaagaucaauagcuuauucaucucuuuuucuuuuucguugguguaaagccaacacccugucuaaaaaacauaaauuucuuuaaucauuuugccucuuuucucugugcuucaauuaauaaaaaauggaaagaaccuagaucuaaaaaaaaaaaaaaaaaaaaaaaaaaaaaaaaaaaaaaaaaaaaaaaaaaaaaaaaaaaaaaaaugcaucccccccccccccccccccccccccccccccaaaggcucuuuucagagccaccagaauu

SEQ ID NO: 224287 - DNA, 42 bp, Artificial Sequence
  5'-UTR of human ribosomal protein Large 32 lacking the 5' terminal oligopyrimidine tract
ggcgctgcctacggaggtggcagccatctccttctcggcatc

SEQ ID NO: 224288 - RNA, 42 nt, Artificial Sequence
  5'-UTR of human ribosomal protein Large 32 lacking the 5' terminal oligopyrimidine tract mRNA
ggcgcugccuacggagguggcagccaucuccuucucggcauc

SEQ ID NO: 224289 - DNA, 75 bp, Artificial Sequence
  5'-UTR of human mitochondrial ATP synthase subunit alpha lacking the 5' terminal oligopyrimidine tract
gcggctcggccattttgtcccagtcagtccggaggctgcggctgcagaagtaccgcctgcggagtaactgcaaag

SEQ ID NO: 224290 - RNA, 75 nt, Artificial Sequence
  5'-UTR of human mitochondrial ATP synthase subunit alpha lacking the 5' terminal oligopyrimidine tract mRNA
gcggcucggccauuuugucccagucaguccggaggcugcggcugcagaaguaccgccugcggaguaacugcaaag

SEQ ID NO: 224291 - DNA, 110 bp, Artificial Sequence
  3'-UTR of Homo sapiens hemoglobin, alpha 1 (HBA1)
gctggagcctcggtggccatgcttcttgccccttgggcctccccccagcccctcctccccttcctgcacccgtacccccgtggtctttgaataaagtctgagtgggcggc

SEQ ID NO: 224292 - RNA, 110 nt, Artificial Sequence
  3'-UTR of Homo sapiens hemoglobin, alpha 1 (HBA1) mRNA
gcuggagccucgguggccaugcuucuugccccuugggccuccccccagccccuccuccccuuccugcacccguacccccguggucuuugaauaaagucugagugggcggc

SEQ ID NO: 224293 - DNA, 108 bp, Artificial Sequence
  3'-UTR of Homo sapiens hemoglobin, alpha 2 (HBA2)
gctggagcctcggtagccgttcctcctgcccgctgggcctcccaacgggccctcctcccctccttgcaccggcccttcctggtctttgaataaagtctgagtgggcag

SEQ ID NO: 224294 - RNA, 108 nt, Artificial Sequence
  3'-UTR of Homo sapiens hemoglobin, alpha 2 (HBA2) mRNA
gcuggagccucgguagccguuccuccugcccgcugggccucccaacgggcccuccuccccuccuugcaccggcccuuccuggucuuugaauaaagucugagugggcag

SEQ ID NO: 224295 - DNA, 132 bp, Artificial Sequence
  3'-UTR of Homo sapiens hemoglobin, beta (HBB)
gctcgctttcttgctgtccaatttctattaaaggttcctttgttccctaagtccaactactaaactgggggatattatgaagggccttgagcatctggattctgcctaataaaaaacatttattttcattgc

SEQ ID NO: 224296 - RNA, 132 nt, Artificial Sequence
  3'-UTR of Homo sapiens hemoglobin, beta (HBB) mRNA
gcucgcuuucuugcuguccaauuucuauuaaagguuccuuuguucccuaaguccaacuacuaaacugggggauauuaugaagggccuugagcaucuggauucugccuaauaaaaaacauuuauuuucauugc

SEQ ID NO: 224297 - DNA, 44 bp, Artificial Sequence
  Center, alpha-complex-binding portion of the 3'-UTR of an alpha-globin gene (muag)
gcccgatgggcctcccaacgggccctcctcccctccttgcaccg

SEQ ID NO: 224298 - RNA, 44 nt, Artificial Sequence
  Center, alpha-complex-binding portion of the 3'-UTR of an alpha-globin gene (muag) mRNA
gcccgaugggccucccaacgggcccuccuccccuccuugcaccg

SEQ ID NO: 224299 - DNA, 186 bp, Artificial Sequence
  3'-UTR of human albumin
catcacatttaaaagcatctcagcctaccatgagaataagagaaagaaaatgaagatcaaaagcttattcatctgtttttctttttcgttggtgtaaagccaacaccctgtctaaaaaacataaatttctttaatcattttgcctcttttctctgtgcttcaattaataaaaaatggaaagaatct

SEQ ID NO: 224300 - RNA, 186 nt, Artificial Sequence
  3'-UTR of human albumin mRNA
caucacauuuaaaagcaucucagccuaccaugagaauaagagaaagaaaaugaagaucaaaagcuuauucaucuguuuuucuuuuucguugguguaaagccaacacccugucuaaaaaacauaaauuucuuuaaucauuuugccucuuuucucugugcuucaauuaauaaaaaauggaaagaaucu

SEQ ID NO: 224301 - DNA, 186 bp, Artificial Sequence
  3'-UTR albumin7
catcacatttaaaagcatctcagcctaccatgagaataagagaaagaaaatgaagatcaatagcttattcatctctttttctttttcgttggtgtaaagccaacaccctgtctaaaaaacataaatttctttaatcattttgcctcttttctctgtgcttcaattaataaaaaatggaaagaacct

SEQ ID NO: 224302 - RNA, 186 nt, Artificial Sequence
  3'-UTR albumin7 mRNA
caucacauuuaaaagcaucucagccuaccaugagaauaagagaaagaaaaugaagaucaauagcuuauucaucucuuuuucuuuuucguugguguaaagccaacacccugucuaaaaaacauaaauuucuuuaaucauuuugccucuuuucucugugcuucaauuaauaaaaaauggaaagaaccu

SEQ ID NO: 224303 - DNA, 187 bp, Artificial Sequence
  3'-UTR ALB7
gcatcacatttaaaagcatctcagcctaccatgagaataagagaaagaaaatgaagatcaatagcttattcatctctttttctttttcgttggtgtaaagccaacaccctgtctaaaaaacataaatttctttaatcattttgcctcttttctctgtgcttcaattaataaaaaatggaaagaacct

SEQ ID NO: 224304 - RNA, 187 nt, Artificial Sequence
  3'-UTR ALB7 mRNA
gcaucacauuuaaaagcaucucagccuaccaugagaauaagagaaagaaaaugaagaucaauagcuuauucaucucuuuuucuuuuucguugguguaaagccaacacccugucuaaaaaacauaaauuucuuuaaucauuuugccucuuuucucugugcuucaauuaauaaaaaauggaaagaaccu

SEQ ID NO: 224305 - DNA, 24 bp, Artificial Sequence
  histone stem-loop sequence
caaaggctcttttcagagccacca

SEQ ID NO: 224306 - RNA, 24 nt, Artificial Sequence
  histone stem-loop sequence mRNA
caaaggcucuuuucagagccacca

SEQ ID NO: 224307 - DNA, 13 bp, Artificial Sequence
  Kozak
gccgccaccatgg

SEQ ID NO: 224308 - RNA, 13 nt, Artificial Sequence
  Kozak mRNA
gccgccaccaugg

SEQ ID NO: 224309 - protein, 449 aa, Artificial Sequence; identical to SEQ ID NO: 26371
  derived and/or modified protein sequence from neuraminidase__InfluenzaA__DQ458993

SEQ ID NO: 224310 - protein, 449 aa, Artificial Sequence
  derived and/or modified protein sequence from neuraminidase__InfluenzaA__AY651445
MNPNQKIITIGSICMVTGIVSLMLQIGNMISIWVSHSIHTGNQHQSEPISNTNLLTEKAVASVKLAGNSSLCPINGWAVYSKDNSIRIGSKGDVFVIREPFISCSHLECRTFFLTQGALLNDKHSNGTVKDRSPHRTLMSCPVGEAPSPYNSRFESVAWSASACHDGTSWLTIGISGPDNGAVAVLKYNGIITDTIKSWRNNILRTQESECACVNGSCFTVMTDGPSNGQASHKIFKMEKGKVVKSVELDAPNYHYEECSCYPDAGEITCVCRDNWHGSNRPWVSFNQNLEYQIGYICSGVFGDNPRPNDGTGSCGPVSSNGAGGVKGFSFKYGNGVWIGRTKSTNSRSGFEMIWDPNGWTETDSSFSVKQDIVAITDWSGYSGSFVQHPELTGLDCIRPCFWVELIRGRPKESTIWTSGSSISFCGVNSDTVGWSWPDGAELPFTIDK

SEQ ID NO: 224311 - RNA, 1350 nt, Artificial Sequence; identical to SEQ ID NO: 58383
  derived and/or modified CDS sequence (wt) from neuraminidase__InfluenzaA__DQ458993

SEQ ID NO: 224312 - RNA, 1350 nt, Artificial Sequence
  derived and/or modified CDS sequence (wt) from neuraminidase__InfluenzaA__AY651445
augaauccaaaucagaagauaauaaccaucggaucaaucuguaugguaacuggaauaguuagcuuaauguuacaaauugggaacaugaucucaauaugggucagucauucaauucacacagggaaucaacaccaaucugaaccaaucagcaauacuaauuugcuuacugagaaagcuguggcuucaguaaaauuagcgggcaauucaucucuuugccccauuaacggaugggcuguauacaguaaggacaacaguauaaggaucgguuccaagggggauguguuuguuauaagagagccguucaucucaugcucccacuuggaaugcagaacuuucuuuuugacucagggagccuugcugaaugacaagcacuccaaugggacugucaaagacagaagcccucacagaacauuaaugaguuguccugugggugaggcucccuccccauauaacucaagguuugagucuguugcuuggucagcaagugcuugccaugauggcaccaguugguugacaauuggaauuucuggcccagacaauggggcgguggcuguauugaaauacaauggcauaauaacagacacuaucaagaguuggaggaacaacauacugagaacucaagagucugaaugugcauguguaaaugguucuugcuuuacuguaaugacugacggaccaaguaauggucaggcaucacauaagaucuucaaaauggaaaaagggaaagugguuaaaucagucgaauuggaugcuccuaauuaucacuaugaggaaugcuccuguuauccugaugccggcgaaaucacaugugugugcagggauaauuggcaugguucaaaucggccauggguaucuuucaaucaaaauuuggaguaucaaauaggauauauaugcaguggaguuuucggagacaauccacgccccaaugauggaacagguaguugugguccgguguccucuaacggggcaggugggguaaaaggguuuucauuuaaauacggcaauggugucuggaucgggagaaccaaaagcacuaauuccaggagcggcuucgaaaugauuugggauccaaauggguggacugaaacggacagcagcuuuucagugaaacaagauaucguagcaauaacugauuggucaggauauagcgggaguuuuguccagcauccagagcugacaggacuagauugcauaagaccuuguuucuggguugaguugaucagagggcggcccaaagagagcacaauuuggacuagugggagcagcauaucuuuuugugguguaaauagugacacuguggguuggucuuggccagacggugcugaguugccauucaccauugacaaguag

SEQ ID NO: 224313 - RNA, 1410 nt, Artificial Sequence
  derived and/or modified CDS sequence (opt1) from neuraminidase__InfluenzaA__AGM53851
augaaccccaaccagaagaucaucaccaucggcagcgugugcaugaccaucgggauggccaaccugauccuccagaucggcaacaucaucuccaucuggaucagccacuccauccagcuggggaaccagaaccagaucgagacgugcaaccagagcgucaucaccuacgagaacaacaccugggugaaccagaccuacgugaacaucuccaacacgaacuucgccgcgggccagagcgucguguccgugaagcuggccgggaacagcucccucugcccggucagcggcugggccaucuacuccaaggacaacagcgugcggaucggcuccaagggggacgucuucgugauccgcgagccguucaucagcugcuccccccuggagugccggaccuucuuccugacccagggcgcccuccugaacgacaagcacagcaacgggaccaucaaggaccgcucccccuaccggacgcugaugagcugcccgaucggcgaggugcccucccccuacaacagccgcuucgagagcgucgccugguccgcgagcgccugccacgacgggaucaacuggcucaccaucggcaucuccggccccgacaacggggccguggccgugcugaaguacaacggcaucaucaccgacaccaucaagagcuggcggaacaacauccugcgcacgcaggaguccgagugcgcgugcgucaacgggagcugcuucaccgugaugaccgacggcccguccaacggccaggccagcuacaagaucuuccggaucgagaaggggaagaucgugaaguccgucgagaugaacgcccccaacuaccacuacgaggagugcagcugcuaccccgacuccagcgagaucaccugcgugugccgcgacaacuggcacggcuccaaccggcccugggugagcuucaaccagaaccucgaguaccagaucggguacaucugcuccggcaucuucggggacaacccgcgccccaacgacaagacgggcagcugcggccccgucuccagcaacggggccaacggcgugaagggguucuccuucaaguacggcaacgggguguggaucggccggaccaagagcaucagcucccgcaacggcuucgagaugaucugggaccccaacggguggaccggcaccgacaacaacuucagcaucaagcaggacaucgucgggaucaacgagugguccggcuacagcggguccuucgugcagcacccggagcugacgggccuggacugcauccggcccugcuucuggguggagcucauccgcggccggcccaaggagaacaccaucuggaccagcggguccagcaucuccuucugcggcgucaacagcgacaccguggggugguccuggcccgacggcgccgagcugccguucacgaucgacaaguga

SEQ ID NO: 224314 - RNA, 1410 nt, Artificial Sequence
  derived and/or modified CDS sequence (opt1) from neuraminidase__InfluenzaA__AGU92703
augaaccccaaccagaagaucaucaccaucggcagcgugugcaugaccaucgggauggccaaccugauccuccagaucggcaacaucaucuccaucuggaucagccacuccauccagcuggggaaccagaaccagaucgagacgugcaaccagagcgucaucaccuacgagaacaacaccugggugaaccagaccuacgugaacaucuccaacacgaacuucgccgcgggccagagcgucguguccgugaagcuggccgggaacagcucccucugcccggucagcggcugggccaucuacuccaaggacaacagcgugcgggugggcuccaagggggacgucuucgugauccgcgagccguucaucagcugcuccccccuggagugccggaccuucuuccugacccagggcgcccuccugaacgacaagcacagcaacgggaccaucaaggaccgcucccccuaccggacgcugaugagcugcccgaucggcgaggugcccucccccuacaacagccgcuucgagagcgucgccugguccgcgagcgccugccacgacgggaucaacuggcucaccaucggcaucuccggccccgacaacggggccguggccgugcugaaguacaacggcaucaucaccgacaccaucaagagcuggcggaacaacauccugcgcacgcaggaguccgagugcgcgugcgucaacgggagcugcuucaccgugaugaccgacggcccguccaacggccaggccagcuacaagaucuuccggaucgagaaggggaagaucgugaaguccgucgagaugaacgcccccaacuaccacuacgaggagugcagcugcuaccccgacuccagcgagaucaccugcgugugccgcgacaacuggcacggcuccaaccggcccugggugagcuucaaccagaaccucgaguaccagaucggguacaucugcuccggcaucuucggggacaacccgcgccccaacgacaagacgggcagcugcggccccgucuccagcaacggggccaacggcgugaagggguucuccuucaaguacggcaacgggguguggaucggccggaccaagagcaucagcucccgcaacggcuucgagaugaucugggaccccaacggguggaccggcaccgacaacaacuucagcaucaagcaggacaucgucgggaucaacgagugguccggcuacagcggguccuucauccagcacccggagcugacgggccuggacugcauccggcccugcuucuggguggagcucauccgcggccggcccaaggagaacaccaucuggaccagcggguccagcaucuccuucugcggcgucaacagcgacaccguggggugguccuggcccgacggcgccgagcugccguucacgaucgacaaguga

SEQ ID NO: 224315 - RNA, 1410 nt, Artificial Sequence
  derived and/or modified CDS sequence (opt1) from neuraminidase__InfluenzaA__EPI578429
augaaccccaaccagaagaucaucaccaucggcagcgugucccugaccaucagcacgaucugcuucuucaugcagaucgccauccucaucaccaccgucacccugcacuucaagcaguacgaguucaacuccccgcccaacaaccaggugaugcugugcgagcccacgaucaucgagcgcaacaucaccgagaucguguaccucaccaacaccacgaucgagaaggagaucugccccaagccggccgaguaccggaacuggagcaagccccagugcgggaucaccggcuucgcgcccuucuccaaggacaacagcauccgccuguccgccgggggcgacaucugggucacccgggagcccuacgugagcugcgacccggacaagugcuaccaguucgcccuggggcagggcaccacgcucaacaacgugcacuccaacaacaccguccgcgaccggacccccuaccgcacccugcugaugaacgagcucggcgugcccuuccaccuggggacgaagcaggucugcaucgccuggagcuccagcuccugccacgacggcaaggccuggcugcacgucugcaucaccggggacgacaagaacgcgaccgccagcuucaucuacaacggccggcucguggacuccguggucagcugguccaaggacauccugcgcacccaggagagcgagugcaucugcaucaacgggacgugcaccguggugaugaccgacggcuccgccagcggcaaggccgacaccaagauccuguucaucgaggaggggaagaucguccacacgagcacccucuccggcagcgcgcagcacguggaggagugcuccugcuacccccgguacccgggggugcgcugcgucugccgggacaacuggaagggcagcaaccgcccgaucguggacaucaacaucaaggaccacuccaucgugagcuccuacgucugcagcggccuggugggggacaccccgcggaagaacgacuccagcuccagcucccacugccuggaccccaacaacgaggagggcgggcacggcgugaaggggugggccuucgacgacggcaacgacgucuggaugggccgcaccaucaacgagacgagccggcucggguacgagaccuucaaggugaucgagggcugguccaacccgaagagcaagcugcagaccaaccgccaggucaucguggaccggggcgaccgcuccggguacagcgggaucuucuccguggagggcaagagcugcaucaaccggugcuucuacgucgagcugauccgcggccggaaggaggagaccgaggugcucuggacgagcaacuccaucguggucuucugcgggaccagcggcaccuacgggaccggcuccuggcccgacggggccgaccugaaccugaugcccaucuga

SEQ ID NO: 224316 - RNA, 1350 nt, Artificial Sequence
  derived and/or modified CDS sequence (opt1) from neuraminidase__InfluenzaA__DQ458993
augaaccccaaccagaagaucaucaccaucggcagcaucugcauggugaucgggaucgucucccugaugcuccagaucggcaacaugaucagcaucugggugucccacagcauccagaccgggaaccagcggcaggccgagccgaucuccaacacgaaguuccugaccgagaaggccguggcgagcgucacccuggccggcaacuccagccucugccccaucuccgggugggccguguacagcaaggacaacuccauccgcaucggcagccggggcgacguguucgucauccgcgagcccuucaucuccugcagccaccuggagugccggaccuucuuccugacgcagggggcccuccugaacgacaagcacuccaacggcaccaucaaggaccgcagcccccaccggacccugauguccugcccggugggggaggcccccagccccuacaacucccgcuucgagagcguggcguggagcgccuccgccugccacgacggcaccagcuggcucacgaucgggaucuccggccccgacaacggcgccgucgcggugcugaaguacaacgggaucaucaccgacaccaucaagagcuggcggaacaacauccugcgcacccaggaguccgagugcgccugcgugaacggcagcugcuucacggucaugaccgacgggccguccagcggccaggccuccuacaagaucuucaagauggagaagggcaagguggugaagagcgucgagcucgacgcccccaacuaccacuacgaggagugcuccugcuaccccgacgccggggagaucaccugcgugugccgggacaacuggcacggcagcaaccgccccuggguguccuucaaccagaaccuggaguaccagaucggguacaucugcagcggcgucuucggggacaacccgcggcccaacgacggcaccggcuccugcgggcccgugagccccaacggcgcguacggggugaagggcuucuccuucaaguacgggaacggcgucuggaucggccgcacgaagagcaccaacucccggagcggguucgagaugaucugggacccgaacggcuggaccgggaccgacagcuccuucagcgugaagcaggacaucguggccaucacggacugguccggcuacagcggguccuucguccagcaccccgagcugaccggccucgacugcauccgccccugcuucuggguggagcugauccggggccgccccaaggagagcaccaucuggaccuccgggagcuccaucagcuucugcggcgucaacuccgacacggugagcugguccuggccggacggggccgagcugcccuucaccaucgacaaguga

SEQ ID NO: 224317 - RNA, 1350 nt, Artificial Sequence
  derived and/or modified CDS sequence (opt1) from neuraminidase__InfluenzaA__AY651445
augaaccccaaccagaagaucaucaccaucggcagcaucugcauggugaccgggaucgucucccugaugcuccagaucggcaacaugaucagcaucugggugucccacagcauccacacggggaaccagcaccaguccgagccgaucagcaacaccaaccugcugaccgagaaggccguggccuccgucaagcucgcgggcaacagcucccugugccccaucaacgggugggccguguacagcaaggacaacuccauccggaucggcagcaagggcgacguguucgucauccgcgagcccuucaucuccugcagccaccuggagugccggaccuucuuccucacgcagggggcccugcugaacgacaagcacuccaacggcaccgugaaggaccgcagcccccaccggacccucauguccugcccggugggggaggcccccagccccuacaacucccgcuucgagagcgucgccuggagcgcguccgccugccacgacggcaccagcuggcugacgaucgggaucuccggccccgacaacggcgccguggccgugcugaaguacaacgggaucaucaccgacaccaucaagagcuggcggaacaacauccuccgcacccaggaguccgagugcgcgugcgucaacggcagcugcuucacggugaugaccgacgggccguccaacggccaggccagccacaagaucuucaagauggagaagggcaagguggucaaguccguggagcuggacgcccccaacuaccacuacgaggagugcagcugcuaccccgacgccggggagaucaccugcgugugccgggacaacuggcacggcuccaaccgccccugggucagcuucaaccagaaccuggaguaccagaucggguacaucugcuccggcguguucggggacaacccgcggcccaacgacggcaccggcagcugcgggcccguguccagcaacggcgccgggggcgucaagggguucuccuucaaguacggcaacggcguguggaucgggcgcacgaagagcaccaacucccggagcggcuucgagaugaucugggaccccaacggguggaccgagaccgacagcuccuucagcgugaagcaggacaucgucgcgaucacggacugguccggcuacagcggguccuucgugcagcacccggagcucaccggccuggacugcauccgccccugcuucugggucgagcugauccggggccgccccaaggagagcaccaucuggaccuccgggagcuccaucagcuucugcggcgugaacuccgacacggugggguggagcuggcccgacggcgccgagcucccguucaccaucgacaaguga

SEQ ID NO: 224318 - RNA, 1627 nt, Artificial Sequence
  mRNA product Design1 comprising derived and/or modified sequence from neuraminidase__InfluenzaA__AGM53851 (CDS opt1) R2031/R2032/R2518
gggagaaagcuuaccaugaaccccaaccagaagaucaucaccaucggcagcgugugcaugaccaucgggauggccaaccugauccuccagaucggcaacaucaucuccaucuggaucagccacuccauccagcuggggaaccagaaccagaucgagacgugcaaccagagcgucaucaccuacgagaacaacaccugggugaaccagaccuacgugaacaucuccaacacgaacuucgccgcgggccagagcgucguguccgugaagcuggccgggaacagcucccucugcccggucagcggcugggccaucuacuccaaggacaacagcgugcggaucggcuccaagggggacgucuucgugauccgcgagccguucaucagcugcuccccccuggagugccggaccuucuuccugacccagggcgcccuccugaacgacaagcacagcaacgggaccaucaaggaccgcucccccuaccggacgcugaugagcugcccgaucggcgaggugcccucccccuacaacagccgcuucgagagcgucgccugguccgcgagcgccugccacgacgggaucaacuggcucaccaucggcaucuccggccccgacaacggggccguggccgugcugaaguacaacggcaucaucaccgacaccaucaagagcuggcggaacaacauccugcgcacgcaggaguccgagugcgcgugcgucaacgggagcugcuucaccgugaugaccgacggcccguccaacggccaggccagcuacaagaucuuccggaucgagaaggggaagaucgugaaguccgucgagaugaacgcccccaacuaccacuacgaggagugcagcugcuaccccgacuccagcgagaucaccugcgugugccgcgacaacuggcacggcuccaaccggcccugggugagcuucaaccagaaccucgaguaccagaucggguacaucugcuccggcaucuucggggacaacccgcgccccaacgacaagacgggcagcugcggccccgucuccagcaacggggccaacggcgugaagggguucuccuucaaguacggcaacgggguguggaucggccggaccaagagcaucagcucccgcaacggcuucgagaugaucugggaccccaacggguggaccggcaccgacaacaacuucagcaucaagcaggacaucgucgggaucaacgagugguccggcuacagcggguccuucgugcagcacccggagcugacgggccuggacugcauccggcccugcuucuggguggagcucauccgcggccggcccaaggagaacaccaucuggaccagcggguccagcaucuccuucugcggcgucaacagcgacaccguggggugguccuggcccgacggcgccgagcugccguucacgaucgacaagugaggacuaguuauaagacugacuagcccgaugggccucccaacgggcccuccuccccuccuugcaccgagauuaauaaaaaaaaaaaaaaaaaaaaaaaaaaaaaaaaaaaaaaaaaaaaaaaaaaaaaaaaaaaaaaaaugcaucccccccccccccccccccccccccccccccaaaggcucuuuucagagccaccagaauu

SEQ ID NO: 224319 - RNA, 1792 nt, Artificial Sequence
  mRNA product Design2 comprising derived and/or modified sequence from neuraminidase__InfluenzaA__AGM53851 (CDS opt1) R2669/R2670
ggggcgcugccuacggagguggcagccaucuccuucucggcaucaagcuuaccaugaaccccaaccagaagaucaucaccaucggcagcgugugcaugaccaucgggauggccaaccugauccuccagaucggcaacaucaucuccaucuggaucagccacuccauccagcuggggaaccagaaccagaucgagacgugcaaccagagcgucaucaccuacgagaacaacaccugggugaaccagaccuacgugaacaucuccaacacgaacuucgccgcgggccagagcgucguguccgugaagcuggccgggaacagcucccucugcccggucagcggcugggccaucuacuccaaggacaacagcgugcggaucggcuccaagggggacgucuucgugauccgcgagccguucaucagcugcuccccccuggagugccggaccuucuuccugacccagggcgcccuccugaacgacaagcacagcaacgggaccaucaaggaccgcucccccuaccggacgcugaugagcugcccgaucggcgaggugcccucccccuacaacagccgcuucgagagcgucgccugguccgcgagcgccugccacgacgggaucaacuggcucaccaucggcaucuccggccccgacaacggggccguggccgugcugaaguacaacggcaucaucaccgacaccaucaagagcuggcggaacaacauccugcgcacgcaggaguccgagugcgcgugcgucaacgggagcugcuucaccgugaugaccgacggcccguccaacggccaggccagcuacaagaucuuccggaucgagaaggggaagaucgugaaguccgucgagaugaacgcccccaacuaccacuacgaggagugcagcugcuaccccgacuccagcgagaucaccugcgugugccgcgacaacuggcacggcuccaaccggcccugggugagcuucaaccagaaccucgaguaccagaucggguacaucugcuccggcaucuucggggacaacccgcgccccaacgacaagacgggcagcugcggccccgucuccagcaacggggccaacggcgugaagggguucuccuucaaguacggcaacgggguguggaucggccggaccaagagcaucagcucccgcaacggcuucgagaugaucugggaccccaacggguggaccggcaccgacaacaacuucagcaucaagcaggacaucgucgggaucaacgagugguccggcuacagcggguccuucgugcagcacccggagcugacgggccuggacugcauccggcccugcuucuggguggagcucauccgcggccggcccaaggagaacaccaucuggaccagcggguccagcaucuccuucugcggcgucaacagcgacaccguggggugguccuggcccgacggcgccgagcugccguucacgaucgacaagugaggacuagugcaucacauuuaaaagcaucucagccuaccaugagaauaagagaaagaaaaugaagaucaauagcuuauucaucucuuuuucuuuuucguugguguaaagccaacacccugucuaaaaaacauaaauuucuuuaaucauuuugccucuuuucucugugcuucaauuaauaaaaaauggaaagaaccuagaucuaaaaaaaaaaaaaaaaaaaaaaaaaaaaaaaaaaaaaaaaaaaaaaaaaaaaaaaaaaaaaaaaugcaucccccccccccccccccccccccccccccccaaaggcucuuuucagagccaccagaauu

SEQ ID NO: 224320 - RNA, 1627 nt, Artificial Sequence
  mRNA product Design1 comprising derived and/or modified sequence from neuraminidase__InfluenzaA__ACT36688 (CDS opt1)
gggagaaagcuuaccaugaaccccaaccagaagaucaucaccaucggcagcgugugcaugaccaucgggauggccaaccugauccuccagaucggcaacaucaucuccaucuggaucagccacuccauccagcuggggaaccagaaccagaucgagacgugcaaccagagcgucaucaccuacgagaacaacaccugggugaaccagaccuacgugaacaucuccaacacgaacuucgccgcgggccagagcgucguguccgugaagcuggccgggaacagcucccucugcccggucagcggcugggccaucuacuccaaggacaacagcgugcgcaucggcuccaagggggacguguucgucauccgggagcccuucaucagcugcagcccccuggagugccgcaccuucuuccugacccagggcgcccuccugaacgacaagcacuccaacgggaccaucaaggaccggucccccuaccgcacgcugaugagcugcccgaucggcgaggugcccucccccuacaacagccgguucgagagcguggccugguccgcgagcgccugccacgacgggaucaacuggcucaccaucggcaucuccggccccgacaacggggccgucgccgugcugaaguacaacggcaucaucaccgacaccaucaagagcuggcgcaacaacauccugcggacgcaggaguccgagugcgcgugcgugaacgggagcugcuucaccgucaugaccgacggcccguccaacggccaggccagcuacaagaucuuccgcaucgagaaggggaagaucgugaaguccguggagaugaacgcccccaacuaccacuacgaggagugcagcugcuaccccgacuccagcgagaucacgugcgucugccgggacaacuggcacggcuccaaccgccccugggugagcuucaaccagaaccucgaguaccagaucggguacaucugcuccggcaucuucggggacaacccgcggcccaacgacaagaccggcagcugcggccccguguccagcaacggggccaacggcgucaagggguucuccuacaaguacggcaacgggguguggaucggccgcaccaagagcaucagcucccggaacggcuucgagaugaucugggaccccaacggguggaccggcaccgacaacaacuucagcaucaagcaggacaucguggggaucaacgagugguccggcuacagcggguccuucguccagcacccggagcugacgggccuggacugcauccgccccugcuucuggguggagcucauccggggccgccccaaggagaacaccaucuggaccagcggguccagcaucuccuucugcggcgucaacagcgacaccguggggugguccuggcccgacggcgccgagcugccguucacgaucgacaagugaggacuaguuauaagacugacuagcccgaugggccucccaacgggcccuccuccccuccuugcaccgagauuaauaaaaaaaaaaaaaaaaaaaaaaaaaaaaaaaaaaaaaaaaaaaaaaaaaaaaaaaaaaaaaaaaugcaucccccccccccccccccccccccccccccccaaaggcucuuuucagagccaccagaauu

SEQ ID NO: 224321 - RNA, 1792 nt, Artificial Sequence
  mRNA product Design2 comprising derived and/or modified sequence from neuraminidase__InfluenzaA__ACT36688 (CDS opt1)
ggggcgcugccuacggagguggcagccaucuccuucucggcaucaagcuuaccaugaaccccaaccagaagaucaucaccaucggcagcgugugcaugaccaucgggauggccaaccugauccuccagaucggcaacaucaucuccaucuggaucagccacuccauccagcuggggaaccagaaccagaucgagacgugcaaccagagcgucaucaccuacgagaacaacaccugggugaaccagaccuacgugaacaucuccaacacgaacuucgccgcgggccagagcgucguguccgugaagcuggccgggaacagcucccucugcccggucagcggcugggccaucuacuccaaggacaacagcgugcgcaucggcuccaagggggacguguucgucauccgggagcccuucaucagcugcagcccccuggagugccgcaccuucuuccugacccagggcgcccuccugaacgacaagcacuccaacgggaccaucaaggaccggucccccuaccgcacgcugaugagcugcccgaucggcgaggugcccucccccuacaacagccgguucgagagcguggccugguccgcgagcgccugccacgacgggaucaacuggcucaccaucggcaucuccggccccgacaacggggccgucgccgugcugaaguacaacggcaucaucaccgacaccaucaagagcuggcgcaacaacauccugcggacgcaggaguccgagugcgcgugcgugaacgggagcugcuucaccgucaugaccgacggcccguccaacggccaggccagcuacaagaucuuccgcaucgagaaggggaagaucgugaaguccguggagaugaacgcccccaacuaccacuacgaggagugcagcugcuaccccgacuccagcgagaucacgugcgucugccgggacaacuggcacggcuccaaccgccccugggugagcuucaaccagaaccucgaguaccagaucggguacaucugcuccggcaucuucggggacaacccgcggcccaacgacaagaccggcagcugcggccccguguccagcaacggggccaacggcgucaagggguucuccuacaaguacggcaacgggguguggaucggccgcaccaagagcaucagcucccggaacggcuucgagaugaucugggaccccaacggguggaccggcaccgacaacaacuucagcaucaagcaggacaucguggggaucaacgagugguccggcuacagcggguccuucguccagcacccggagcugacgggccuggacugcauccgccccugcuucuggguggagcucauccggggccgccccaaggagaacaccaucuggaccagcggguccagcaucuccuucugcggcgucaacagcgacaccguggggugguccuggcccgacggcgccgagcugccguucacgaucgacaagugaggacuagugcaucacauuuaaaagcaucucagccuaccaugagaauaagagaaagaaaaugaagaucaauagcuuauucaucucuuuuucuuuuucguugguguaaagccaacacccugucuaaaaaacauaaauuucuuuaaucauuuugccucuuuucucugugcuucaauuaauaaaaaauggaaagaaccuagaucuaaaaaaaaaaaaaaaaaaaaaaaaaaaaaaaaaaaaaaaaaaaaaaaaaaaaaaaaaaaaaaaaugcaucccccccccccccccccccccccccccccccaaaggcucuuuucagagccaccagaauu

SEQ ID NO: 224322 - RNA, 1627 nt, Artificial Sequence
  mRNA product Design1 comprising derived and/or modified sequence from neuraminidase__InfluenzaA__EPI731464 (CDS opt1)
gggagaaagcuuaccaugaaccccaaccagaagaucaucaccaucggcagcgugugcaugaccaucgggauggccaaccugauccuccagaucggcaacaucaucuccaucuggaucagccacuccauccagcuggggaaccagaaccagaucgagacgugcaaccagagcgucaucaccuacgagaacaacaccugggugaaccagaccuacgugaacaucuccaacacgaacuucgccgcgggccagagcgucguguccgugaagcuggccgggggcagcucccucugcccggucagcggcugggccaucuacuccaaggacaacagcgugcgcaucggguccaagggcgacguguucgucauccgggagcccuucaucagcugcagcccccuggagugccgcaccuucuuccugacccagggggcccuccugaacgacaagcacuccaacggcaccaucaaggaccggucccccuaccgcacgcugaugagcugcccgaucggggaggugcccucccccuacaacagccgguucgagagcguggccugguccgcgagcgccugccacgacggcaucaacuggcucaccaucggcaucuccgggcccgacaacggcgccgucgccgugcugaaguacaacgggaucaucaccgacaccaucaagagcuggcgcaacaacauccugcggacgcaggaguccgagugcgcgugcgugaacggcagcugcuucaccgucaugaccgacggcccguccaacgggcaggccagcuacaagaucuuccgcaucgagaagggcaagaucgugaaguccguggagaugaacgcccccaacuaccacuacgaggagugcagcugcuaccccgacuccagcgagaucacgugcgucugccgggacaacuggcacggguccaaccgccccugggugagcuucaaccagaaccucgaguaccagaucggcuacaucugcuccgggaucuucggcgacaacccgcggcccaacgacaagaccggcagcugcgggcccguguccagcaacggcgccaacggggucaagggcuucuccuucaaguacgggaacggcguguggaucggccgcaccaagagcaucagcucccggaacggguucgagaugaucugggaccccaacggcuggaccgggaccgacaacaacuucagcaucaagcaggacaucgugggcaucaacgagugguccggguacagcggcuccuucguccagcacccggagcugacgggccuggacugcauccgccccugcuucuggguggagcucauccgggggcgccccaaggagaacaccaucuggaccagcggcuccagcaucuccuucugcggggucaacagcgacaccgugggcugguccuggcccgacggcgccgagcugccguucacgaucgacaagugaggacuaguuauaagacugacuagcccgaugggccucccaacgggcccuccuccccuccuugcaccgagauuaauaaaaaaaaaaaaaaaaaaaaaaaaaaaaaaaaaaaaaaaaaaaaaaaaaaaaaaaaaaaaaaaaugcaucccccccccccccccccccccccccccccccaaaggcucuuuucagagccaccagaauu

SEQ ID NO: 224323 - RNA, 1792 nt, Artificial Sequence
  mRNA product Design2 comprising derived and/or modified sequence from neuraminidase__InfluenzaA__EPI731464 (CDS opt1)
ggggcgcugccuacggagguggcagccaucuccuucucggcaucaagcuuaccaugaaccccaaccagaagaucaucaccaucggcagcgugugcaugaccaucgggauggccaaccugauccuccagaucggcaacaucaucuccaucuggaucagccacuccauccagcuggggaaccagaaccagaucgagacgugcaaccagagcgucaucaccuacgagaacaacaccugggugaaccagaccuacgugaacaucuccaacacgaacuucgccgcgggccagagcgucguguccgugaagcuggccgggggcagcucccucugcccggucagcggcugggccaucuacuccaaggacaacagcgugcgcaucggguccaagggcgacguguucgucauccgggagcccuucaucagcugcagcccccuggagugccgcaccuucuuccugacccagggggcccuccugaacgacaagcacuccaacggcaccaucaaggaccggucccccuaccgcacgcugaugagcugcccgaucggggaggugcccucccccuacaacagccgguucgagagcguggccugguccgcgagcgccugccacgacggcaucaacuggcucaccaucggcaucuccgggcccgacaacggcgccgucgccgugcugaaguacaacgggaucaucaccgacaccaucaagagcuggcgcaacaacauccugcggacgcaggaguccgagugcgcgugcgugaacggcagcugcuucaccgucaugaccgacggcccguccaacgggcaggccagcuacaagaucuuccgcaucgagaagggcaagaucgugaaguccguggagaugaacgcccccaacuaccacuacgaggagugcagcugcuaccccgacuccagcgagaucacgugcgucugccgggacaacuggcacggguccaaccgccccugggugagcuucaaccagaaccucgaguaccagaucggcuacaucugcuccgggaucuucggcgacaacccgcggcccaacgacaagaccggcagcugcgggcccguguccagcaacggcgccaacggggucaagggcuucuccuucaaguacgggaacggcguguggaucggccgcaccaagagcaucagcucccggaacggguucgagaugaucugggaccccaacggcuggaccgggaccgacaacaacuucagcaucaagcaggacaucgugggcaucaacgagugguccggguacagcggcuccuucguccagcacccggagcugacgggccuggacugcauccgccccugcuucuggguggagcucauccgggggcgccccaaggagaacaccaucuggaccagcggcuccagcaucuccuucugcggggucaacagcgacaccgugggcugguccuggcccgacggcgccgagcugccguucacgaucgacaagugaggacuagugcaucacauuuaaaagcaucucagccuaccaugagaauaagagaaagaaaaugaagaucaauagcuuauucaucucuuuuucuuuuucguugguguaaagccaacacccugucuaaaaaacauaaauuucuuuaaucauuuugccucuuuucucugugcuucaauuaauaaaaaauggaaagaaccuagaucuaaaaaaaaaaaaaaaaaaaaaaaaaaaaaaaaaaaaaaaaaaaaaaaaaaaaaaaaaaaaaaaaugcaucccccccccccccccccccccccccccccccaaaggcucuuuucagagccaccagaauu

SEQ ID NO: 224324 - RNA, 1627 nt, Artificial Sequence
  mRNA product Design1 comprising derived and/or modified sequence from neuraminidase__InfluenzaA__EPI662593 (CDS opt1)
gggagaaagcuuaccaugaaccccaaccagaagaucaucaccaucggcagcaucugcaugaccaucgggauggccaaccugauccuccagaucggcaacaucaucuccaucugggugagccacuccauccagaucgggaaccagagccagaucgagacgugcaaccaguccgucaucaccuacgagaacaacaccugggugaaccagaccuacgugaacaucagcaacacgaacuucgccgcgggccaguccgucgugagcgugaagcuggccgggaacuccagccugugcccggucuccggcugggccaucuacagcaaggacaacuccgugcgcaucggcagcaagggggacguguucgucauccgggagcccuucaucuccugcagcccccucgagugccgcaccuucuuccugacccagggcgcccugcucaacgacaagcacuccaacgggaccaucaaggaccggagccccuaccgcacgcugauguccugcccgaucggcgaggugcccagccccuacaacagccgguucgaguccguggccuggagcgcguccgccugccacgacgggaucaacuggcugaccaucggcaucagcggccccgacuccggggccgucgccgugcucaaguacaacggcaucaucaccgacaccaucaagagcuggcgcaacaacauccugcggacgcaggaguccgagugcgcgugcgugaacgggagcugcuucaccaucaugaccgacggcccguccgacggccaggccagcuacaagaucuuccgcaucgagaaggggaagaucaucaaguccgucgagaugaaggcccccaacuaccacuacgaggagugcagcugcuaccccgacuccagcgagaucacgugcgugugccgggacaacuggcacggcuccaaccgccccugggugagcuucaaccagaaccuggaguaccagaugggguacaucugcuccggcgucuucggggacaacccgcggcccaacgacaagaccggcagcugcggccccguguccagcaacggggccaacggcgugaagggguucagcuucaaguacggcaacggggucuggaucggccgcaccaaguccaucagcucccggaagggcuucgagaugaucugggaccccaacggguggaccggcaccgacaacaaguucagcaucaagcaggacaucguggggaucaacgagugguccggcuacagcggguccuucgugcagcacccggagcucacgggccuggacugcauccgccccugcuucugggucgagcugauccggggccgccccgaggagaacaccaucuggaccagcggguccagcaucuccuucugcggcgugaacagcgacaccgucgggugguccuggcccgacggcgccgagcucccguucacgaucgacaagugaggacuaguuauaagacugacuagcccgaugggccucccaacgggcccuccuccccuccuugcaccgagauuaauaaaaaaaaaaaaaaaaaaaaaaaaaaaaaaaaaaaaaaaaaaaaaaaaaaaaaaaaaaaaaaaaugcaucccccccccccccccccccccccccccccccaaaggcucuuuucagagccaccagaauu

SEQ ID NO: 224325 - RNA, 1792 nt, Artificial Sequence
  mRNA product Design2 comprising derived and/or modified sequence from neuraminidase__InfluenzaA__EPI662593 (CDS opt1)
ggggcgcugccuacggagguggcagccaucuccuucucggcaucaagcuuaccaugaaccccaaccagaagaucaucaccaucggcagcaucugcaugaccaucgggauggccaaccugauccuccagaucggcaacaucaucuccaucugggugagccacuccauccagaucgggaaccagagccagaucgagacgugcaaccaguccgucaucaccuacgagaacaacaccugggugaaccagaccuacgugaacaucagcaacacgaacuucgccgcgggccaguccgucgugagcgugaagcuggccgggaacuccagccugugcccggucuccggcugggccaucuacagcaaggacaacuccgugcgcaucggcagcaagggggacguguucgucauccgggagcccuucaucuccugcagcccccucgagugccgcaccuucuuccugacccagggcgcccugcucaacgacaagcacuccaacgggaccaucaaggaccggagccccuaccgcacgcugauguccugcccgaucggcgaggugcccagccccuacaacagccgguucgaguccguggccuggagcgcguccgccugccacgacgggaucaacuggcugaccaucggcaucagcggccccgacuccggggccgucgccgugcucaaguacaacggcaucaucaccgacaccaucaagagcuggcgcaacaacauccugcggacgcaggaguccgagugcgcgugcgugaacgggagcugcuucaccaucaugaccgacggcccguccgacggccaggccagcuacaagaucuuccgcaucgagaaggggaagaucaucaaguccgucgagaugaaggcccccaacuaccacuacgaggagugcagcugcuaccccgacuccagcgagaucacgugcgugugccgggacaacuggcacggcuccaaccgccccugggugagcuucaaccagaaccuggaguaccagaugggguacaucugcuccggcgucuucggggacaacccgcggcccaacgacaagaccggcagcugcggccccguguccagcaacggggccaacggcgugaagggguucagcuucaaguacggcaacggggucuggaucggccgcaccaaguccaucagcucccggaagggcuucgagaugaucugggaccccaacggguggaccggcaccgacaacaaguucagcaucaagcaggacaucguggggaucaacgagugguccggcuacagcggguccuucgugcagcacccggagcucacgggccuggacugcauccgccccugcuucugggucgagcugauccggggccgccccgaggagaacaccaucuggaccagcggguccagcaucuccuucugcggcgugaacagcgacaccgucgggugguccuggcccgacggcgccgagcucccguucacgaucgacaagugaggacuagugcaucacauuuaaaagcaucucagccuaccaugagaauaagagaaagaaaaugaagaucaauagcuuauucaucucuuuuucuuuuucguugguguaaagccaacacccugucuaaaaaacauaaauuucuuuaaucauuuugccucuuuucucugugcuucaauuaauaaaaaauggaaagaaccuagaucuaaaaaaaaaaaaaaaaaaaaaaaaaaaaaaaaaaaaaaaaaaaaaaaaaaaaaaaaaaaaaaaaugcaucccccccccccccccccccccccccccccccaaaggcucuuuucagagccaccagaauu

SEQ ID NO: 224326 - RNA, 1627 nt, Artificial Sequence
  mRNA product Design1 comprising derived and/or modified sequence from neuraminidase__InfluenzaA__AGU92703 (CDS opt1) R2426/R2428
gggagaaagcuuaccaugaaccccaaccagaagaucaucaccaucggcagcgugugcaugaccaucgggauggccaaccugauccuccagaucggcaacaucaucuccaucuggaucagccacuccauccagcuggggaaccagaaccagaucgagacgugcaaccagagcgucaucaccuacgagaacaacaccugggugaaccagaccuacgugaacaucuccaacacgaacuucgccgcgggccagagcgucguguccgugaagcuggccgggaacagcucccucugcccggucagcggcugggccaucuacuccaaggacaacagcgugcgggugggcuccaagggggacgucuucgugauccgcgagccguucaucagcugcuccccccuggagugccggaccuucuuccugacccagggcgcccuccugaacgacaagcacagcaacgggaccaucaaggaccgcucccccuaccggacgcugaugagcugcccgaucggcgaggugcccucccccuacaacagccgcuucgagagcgucgccugguccgcgagcgccugccacgacgggaucaacuggcucaccaucggcaucuccggccccgacaacggggccguggccgugcugaaguacaacggcaucaucaccgacaccaucaagagcuggcggaacaacauccugcgcacgcaggaguccgagugcgcgugcgucaacgggagcugcuucaccgugaugaccgacggcccguccaacggccaggccagcuacaagaucuuccggaucgagaaggggaagaucgugaaguccgucgagaugaacgcccccaacuaccacuacgaggagugcagcugcuaccccgacuccagcgagaucaccugcgugugccgcgacaacuggcacggcuccaaccggcccugggugagcuucaaccagaaccucgaguaccagaucggguacaucugcuccggcaucuucggggacaacccgcgccccaacgacaagacgggcagcugcggccccgucuccagcaacggggccaacggcgugaagggguucuccuucaaguacggcaacgggguguggaucggccggaccaagagcaucagcucccgcaacggcuucgagaugaucugggaccccaacggguggaccggcaccgacaacaacuucagcaucaagcaggacaucgucgggaucaacgagugguccggcuacagcggguccuucauccagcacccggagcugacgggccuggacugcauccggcccugcuucuggguggagcucauccgcggccggcccaaggagaacaccaucuggaccagcggguccagcaucuccuucugcggcgucaacagcgacaccguggggugguccuggcccgacggcgccgagcugccguucacgaucgacaagugaggacuaguuauaagacugacuagcccgaugggccucccaacgggcccuccuccccuccuugcaccgagauuaauaaaaaaaaaaaaaaaaaaaaaaaaaaaaaaaaaaaaaaaaaaaaaaaaaaaaaaaaaaaaaaaaugcaucccccccccccccccccccccccccccccccaaaggcucuuuucagagccaccagaauu

SEQ ID NO: 224327 - RNA, 1792 nt, Artificial Sequence
  mRNA product Design2 comprising derived and/or modified sequence from neuraminidase__InfluenzaA__AGU92703 (CDS opt1)
ggggcgcugccuacggagguggcagccaucuccuucucggcaucaagcuuaccaugaaccccaaccagaagaucaucaccaucggcagcgugugcaugaccaucgggauggccaaccugauccuccagaucggcaacaucaucuccaucuggaucagccacuccauccagcuggggaaccagaaccagaucgagacgugcaaccagagcgucaucaccuacgagaacaacaccugggugaaccagaccuacgugaacaucuccaacacgaacuucgccgcgggccagagcgucguguccgugaagcuggccgggaacagcucccucugcccggucagcggcugggccaucuacuccaaggacaacagcgugcgggugggcuccaagggggacgucuucgugauccgcgagccguucaucagcugcuccccccuggagugccggaccuucuuccugacccagggcgcccuccugaacgacaagcacagcaacgggaccaucaaggaccgcucccccuaccggacgcugaugagcugcccgaucggcgaggugcccucccccuacaacagccgcuucgagagcgucgccugguccgcgagcgccugccacgacgggaucaacuggcucaccaucggcaucuccggccccgacaacggggccguggccgugcugaaguacaacggcaucaucaccgacaccaucaagagcuggcggaacaacauccugcgcacgcaggaguccgagugcgcgugcgucaacgggagcugcuucaccgugaugaccgacggcccguccaacggccaggccagcuacaagaucuuccggaucgagaaggggaagaucgugaaguccgucgagaugaacgcccccaacuaccacuacgaggagugcagcugcuaccccgacuccagcgagaucaccugcgugugccgcgacaacuggcacggcuccaaccggcccugggugagcuucaaccagaaccucgaguaccagaucggguacaucugcuccggcaucuucggggacaacccgcgccccaacgacaagacgggcagcugcggccccgucuccagcaacggggccaacggcgugaagggguucuccuucaaguacggcaacgggguguggaucggccggaccaagagcaucagcucccgcaacggcuucgagaugaucugggaccccaacggguggaccggcaccgacaacaacuucagcaucaagcaggacaucgucgggaucaacgagugguccggcuacagcggguccuucauccagcacccggagcugacgggccuggacugcauccggcccugcuucuggguggagcucauccgcggccggcccaaggagaacaccaucuggaccagcggguccagcaucuccuucugcggcgucaacagcgacaccguggggugguccuggcccgacggcgccgagcugccguucacgaucgacaagugaggacuagugcaucacauuuaaaagcaucucagccuaccaugagaauaagagaaagaaaaugaagaucaauagcuuauucaucucuuuuucuuuuucguugguguaaagccaacacccugucuaaaaaacauaaauuucuuuaaucauuuugccucuuuucucugugcuucaauuaauaaaaaauggaaagaaccuagaucuaaaaaaaaaaaaaaaaaaaaaaaaaaaaaaaaaaaaaaaaaaaaaaaaaaaaaaaaaaaaaaaaugcaucccccccccccccccccccccccccccccccaaaggcucuuuucagagccaccagaauu

SEQ ID NO: 224328 - RNA, 1627 nt, Artificial Sequence
  mRNA product Design1 comprising derived and/or modified sequence from neuraminidase__InfluenzaA__AGU92879 (CDS opt1)
gggagaaagcuuaccaugaaccccaaccagaagaucaucaccaucggcagcgugugcaugaccaucgggauggccaaccugauccuccagaucggcaacaucaucuccaucuggaucagccacuccauccagcuggggaaccagaaccagaucgagacgugcaaccagagcgucaucaccuacgagaacaacaccugggugaaccagaccuacgugaacaucuccaacacgaacuucgccgcgggccagagcgucguguccgugaagcuggccgggaacagcucccucugcccggucagcggcugggccaucuacuccaaggacaacagcgugcgcgugggcuccaagggggacgucuucgugauccgggagcccuucaucagcugcagcccccuggagugccgcaccuucuuccugacccagggcgcccuccugaacgacaagcacuccaacgggaccaucaaggaccggucccccuaccgcacgcugaugagcugcccgaucggcgaggugcccucccccuacaacagccgguucgagagcgucgccugguccgcgagcgccugccacgacgggaucaacuggcucaccaucggcaucuccggccccgacaacggggccguggccgugcugaaguacaacggcaucaucaccgacaccaucaagagcuggcgcaacaacauccugcggacgcaggaguccgagugcgcgugcgucaacgggagcugcuucaccgugaugaccgacggcccguccaacggccaggccagcuacaagaucuuccgcaucgagaaggggaagaucgugaaguccgucgagaugaacgcccccaacuaccacuacgaggagugcagcugcuaccccgacuccagcgagaucacgugcgugugccgggacaacuggcacggcuccaaccgccccugggugagcuucaaccagaaccucgaguaccagaucggguacaucugcuccggcaucuucggggacaacccgcggcccaacgacaagaccggcagcugcggccccgucuccagcaacggggccaacggcgugaagggguucuccuucaaguacggcaacgggguguggaucggccgcaccaagagcaucagcucccggaacggcuucgagaugaucugggaccccaacggguggaccgagaccgacaacaacuucagcaucaagcaggacaucgucggcaucaacgagugguccggguacagcggcuccuucauccagcacccggagcugacggggcuggacugcauccgccccugcuucuggguggagcucauccggggccgccccaaggagaacaccaucuggaccagcggcuccagcaucuccuucugcggggucaacagcgacaccgugggcugguccuggcccgacggggccgagcugccguucacgaucgacaagugaggacuaguuauaagacugacuagcccgaugggccucccaacgggcccuccuccccuccuugcaccgagauuaauaaaaaaaaaaaaaaaaaaaaaaaaaaaaaaaaaaaaaaaaaaaaaaaaaaaaaaaaaaaaaaaaugcaucccccccccccccccccccccccccccccccaaaggcucuuuucagagccaccagaauu

SEQ ID NO: 224329 - RNA, 1792 nt, Artificial Sequence
  mRNA product Design2 comprising derived and/or modified sequence from neuraminidase__InfluenzaA__AGU92879 (CDS opt1)
ggggcgcugccuacggagguggcagccaucuccuucucggcaucaagcuuaccaugaaccccaaccagaagaucaucaccaucggcagcgugugcaugaccaucgggauggccaaccugauccuccagaucggcaacaucaucuccaucuggaucagccacuccauccagcuggggaaccagaaccagaucgagacgugcaaccagagcgucaucaccuacgagaacaacaccugggugaaccagaccuacgugaacaucuccaacacgaacuucgccgcgggccagagcgucguguccgugaagcuggccgggaacagcucccucugcccggucagcggcugggccaucuacuccaaggacaacagcgugcgcgugggcuccaagggggacgucuucgugauccgggagcccuucaucagcugcagcccccuggagugccgcaccuucuuccugacccagggcgcccuccugaacgacaagcacuccaacgggaccaucaaggaccggucccccuaccgcacgcugaugagcugcccgaucggcgaggugcccucccccuacaacagccgguucgagagcgucgccugguccgcgagcgccugccacgacgggaucaacuggcucaccaucggcaucuccggccccgacaacggggccguggccgugcugaaguacaacggcaucaucaccgacaccaucaagagcuggcgcaacaacauccugcggacgcaggaguccgagugcgcgugcgucaacgggagcugcuucaccgugaugaccgacggcccguccaacggccaggccagcuacaagaucuuccgcaucgagaaggggaagaucgugaaguccgucgagaugaacgcccccaacuaccacuacgaggagugcagcugcuaccccgacuccagcgagaucacgugcgugugccgggacaacuggcacggcuccaaccgccccugggugagcuucaaccagaaccucgaguaccagaucggguacaucugcuccggcaucuucggggacaacccgcggcccaacgacaagaccggcagcugcggccccgucuccagcaacggggccaacggcgugaagggguucuccuucaaguacggcaacgggguguggaucggccgcaccaagagcaucagcucccggaacggcuucgagaugaucugggaccccaacggguggaccgagaccgacaacaacuucagcaucaagcaggacaucgucggcaucaacgagugguccggguacagcggcuccuucauccagcacccggagcugacggggcuggacugcauccgccccugcuucuggguggagcucauccggggccgccccaaggagaacaccaucuggaccagcggcuccagcaucuccuucugcggggucaacagcgacaccgugggcugguccuggcccgacggggccgagcugccguucacgaucgacaagugaggacuagugcaucacauuuaaaagcaucucagccuaccaugagaauaagagaaagaaaaugaagaucaauagcuuauucaucucuuuuucuuuuucguugguguaaagccaacacccugucuaaaaaacauaaauuucuuuaaucauuuugccucuuuucucugugcuucaauuaauaaaaaauggaaagaaccuagaucuaaaaaaaaaaaaaaaaaaaaaaaaaaaaaaaaaaaaaaaaaaaaaaaaaaaaaaaaaaaaaaaaugcaucccccccccccccccccccccccccccccccaaaggcucuuuucagagccaccagaauu

SEQ ID NO: 224330 - RNA, 1627 nt, Artificial Sequence
  mRNA product Design1 comprising derived and/or modified sequence from neuraminidase__InfluenzaA__AGU92857 (CDS opt1)
gggagaaagcuuaccaugaaccccaaccagaagaucaucaccaucggcagcgugugcaugaccaucgggauggccaaccugauccuccagaucggcaacaucaucuccaucuggaucagccacuccauccagcuggggaaccagaaccagaucgagacgugcaaccagagcgucaucaccuacgagaacaacaccugggugaaccagaccuacgugaacaucuccaacacgaacuucgccgcgggccagagcgucguguccgugaaguucgccgggaacagcucccugugcccggucagcggcugggccaucuacuccaaggacaacagcgugcgcgugggcuccaagggggacgucuucgugauccgggagcccuucaucagcugcagcccccucgagugccgcaccuucuuccugacccagggcgcccugcucaacgacaagcacuccaacgggaccaucaaggaccggucccccuaccgcacgcugaugagcugcccgaucggcgaggugcccucccccuacaacagccgguucgagagcgucgccugguccgcgagcgccugccacgacgggaucaacuggcugaccaucggcaucuccggccccgacaacggggccguggccgugcucaaguacaacggcaucaucaccgacaccaucaagagcuggcgcaacaacauccugcggacgcaggaguccgagugcgcgugcgucaacgggagcugcuucaccgugaugaccgacggcccguccaacggccaggccagcuacaagaucuuccgcaucgagaaggggaagaucgugaaguccgucgagaugaacgcccccaacuaccacuacgaggagugcagcugcuaccccgacuccagcgagaucacgugcgugugccgggacaacuggcacggcuccaaccgccccugggugagcuucaaccagaaccuggaguaccagaucggguacaucugcuccggcaucuucggggacaacccgcggcccaacgacaagaccggcagcugcggccccgucuccagcaacggggccaacggcgugaagggguucuccuucaaguacggcaacgggguguggaucggccgcaccaagagcaucagcucccggaacggcuucgagaugaucugggaccccaacggguggaccggcaccgacaacaacuucagcaucaagcaggacaucgucgggaucaacgagugguccggcuacagcggguccuucauccagcacccggagcucacgggccuggacugcauccgccccugcuucuggguggagcugauccggggccgccccaaggagaacaccaucuggaccagcggguccagcaucuccuucugcggcgucaacagcgacaccguggggugguccuggcccgacggcgccgagcucccguucacgaucgacaagugaggacuaguuauaagacugacuagcccgaugggccucccaacgggcccuccuccccuccuugcaccgagauuaauaaaaaaaaaaaaaaaaaaaaaaaaaaaaaaaaaaaaaaaaaaaaaaaaaaaaaaaaaaaaaaaaugcaucccccccccccccccccccccccccccccccaaaggcucuuuucagagccaccagaauu

SEQ ID NO: 224331 - RNA, 1792 nt, Artificial Sequence
  mRNA product Design2 comprising derived and/or modified sequence from neuraminidase__InfluenzaA__AGU92857 (CDS opt1)
ggggcgcugccuacggagguggcagccaucuccuucucggcaucaagcuuaccaugaaccccaaccagaagaucaucaccaucggcagcgugugcaugaccaucgggauggccaaccugauccuccagaucggcaacaucaucuccaucuggaucagccacuccauccagcuggggaaccagaaccagaucgagacgugcaaccagagcgucaucaccuacgagaacaacaccugggugaaccagaccuacgugaacaucuccaacacgaacuucgccgcgggccagagcgucguguccgugaaguucgccgggaacagcucccugugcccggucagcggcugggccaucuacuccaaggacaacagcgugcgcgugggcuccaagggggacgucuucgugauccgggagcccuucaucagcugcagcccccucgagugccgcaccuucuuccugacccagggcgcccugcucaacgacaagcacuccaacgggaccaucaaggaccggucccccuaccgcacgcugaugagcugcccgaucggcgaggugcccucccccuacaacagccgguucgagagcgucgccugguccgcgagcgccugccacgacgggaucaacuggcugaccaucggcaucuccggccccgacaacggggccguggccgugcucaaguacaacggcaucaucaccgacaccaucaagagcuggcgcaacaacauccugcggacgcaggaguccgagugcgcgugcgucaacgggagcugcuucaccgugaugaccgacggcccguccaacggccaggccagcuacaagaucuuccgcaucgagaaggggaagaucgugaaguccgucgagaugaacgcccccaacuaccacuacgaggagugcagcugcuaccccgacuccagcgagaucacgugcgugugccgggacaacuggcacggcuccaaccgccccugggugagcuucaaccagaaccuggaguaccagaucggguacaucugcuccggcaucuucggggacaacccgcggcccaacgacaagaccggcagcugcggccccgucuccagcaacggggccaacggcgugaagggguucuccuucaaguacggcaacgggguguggaucggccgcaccaagagcaucagcucccggaacggcuucgagaugaucugggaccccaacggguggaccggcaccgacaacaacuucagcaucaagcaggacaucgucgggaucaacgagugguccggcuacagcggguccuucauccagcacccggagcucacgggccuggacugcauccgccccugcuucuggguggagcugauccggggccgccccaaggagaacaccaucuggaccagcggguccagcaucuccuucugcggcgucaacagcgacaccguggggugguccuggcccgacggcgccgagcucccguucacgaucgacaagugaggacuagugcaucacauuuaaaagcaucucagccuaccaugagaauaagagaaagaaaaugaagaucaauagcuuauucaucucuuuuucuuuuucguugguguaaagccaacacccugucuaaaaaacauaaauuucuuuaaucauuuugccucuuuucucugugcuucaauuaauaaaaaauggaaagaaccuagaucuaaaaaaaaaaaaaaaaaaaaaaaaaaaaaaaaaaaaaaaaaaaaaaaaaaaaaaaaaaaaaaaaugcaucccccccccccccccccccccccccccccccaaaggcucuuuucagagccaccagaauu

SEQ ID NO: 224332 - RNA, 1627 nt, Artificial Sequence
  mRNA product Design1 comprising derived and/or modified sequence from neuraminidase__InfluenzaA__AGU92846 (CDS opt1)
gggagaaagcuuaccaugaaccccaaccagaagaucaucaccaucggcagcgugugcaugaccaucgggauggccaaccugauccuccagaucggcaacaucaucuccaucuggaucagccacuccauccagcuggggaaccagaaccagaucgagacgugcaaccagagcgucaucaccuacgagaacaacaccugggugaaccagaccuacgugaacaucuccaacacgaacuucgccgcgggccagagcgucguguccgugaagcuggccgggaacagcucccucugcccggucagcggcugggccaucuacuccaaggacaacagcgugcgcgugggcuccaagggggacgucuucgugauccgggagcccuucaucagcugcagcccccuggagugccgcaccuucuuccugacccagggcgcccuccugaacgacaagcacuccaacgggaccaucaaggaccggucccccuaccgcacgcugaugagcugcccgaucggcgaggugcccucccccuacaacagccgguucgagagcgucgccugguccgcgagcgccugccacgacgggaucaacuggcucaccaucggcaucuccggccccgacaacggggccguggccgugcugaaguacaacggcaucaucaccgacaccaucaagagcuggcgcaacaacauccugcggacgcaggaguccgagugcgcgugcgucaacgggagcugcuucaccgugaugaccgacggcccguccaacggccaggccagcuacaagaucuuccgcaucgagaaggggaagaucgugaaguccgucgagaugaacgcccccaacuaccacuacgaggagugcagcugcuaccccgacuccagcgagaucacgugcgugugccgggacaacuggcacggcuccaaccgccccugggugagcuucaaccagaaccucgaguaccagaucggguacaucugcuccggcaucuucggggacaacccgcggcccaacgacaagaccggcagcugcggccccgucuccagcaacggggccaacggcgugaagggguucgccuucaaguacggcaacgggguguggaucggccgcaccaaguccaucagcagccggaacggcuucgagaugaucugggaccccaacggguggaccggcaccgacaacaacuucuccaucaagcaggacaucgucgggaucaacgaguggagcggcuacuccgggagcuucauccagcacccggagcugacgggccuggacugcauccgccccugcuucuggguggagcucauccggggccgccccaaggagaacaccaucuggaccuccgggagcuccaucagcuucugcggcgucaacuccgacaccgugggguggagcuggcccgacggcgcggagcugccguucacgaucgacaagugaggacuaguuauaagacugacuagcccgaugggccucccaacgggcccuccuccccuccuugcaccgagauuaauaaaaaaaaaaaaaaaaaaaaaaaaaaaaaaaaaaaaaaaaaaaaaaaaaaaaaaaaaaaaaaaaugcaucccccccccccccccccccccccccccccccaaaggcucuuuucagagccaccagaauu

SEQ ID NO: 224333 - RNA, 1792 nt, Artificial Sequence
  mRNA product Design2 comprising derived and/or modified sequence from neuraminidase__InfluenzaA__AGU92846 (CDS opt1)
ggggcgcugccuacggagguggcagccaucuccuucucggcaucaagcuuaccaugaaccccaaccagaagaucaucaccaucggcagcgugugcaugaccaucgggauggccaaccugauccuccagaucggcaacaucaucuccaucuggaucagccacuccauccagcuggggaaccagaaccagaucgagacgugcaaccagagcgucaucaccuacgagaacaacaccugggugaaccagaccuacgugaacaucuccaacacgaacuucgccgcgggccagagcgucguguccgugaagcuggccgggaacagcucccucugcccggucagcggcugggccaucuacuccaaggacaacagcgugcgcgugggcuccaagggggacgucuucgugauccgggagcccuucaucagcugcagcccccuggagugccgcaccuucuuccugacccagggcgcccuccugaacgacaagcacuccaacgggaccaucaaggaccggucccccuaccgcacgcugaugagcugcccgaucggcgaggugcccucccccuacaacagccgguucgagagcgucgccugguccgcgagcgccugccacgacgggaucaacuggcucaccaucggcaucuccggccccgacaacggggccguggccgugcugaaguacaacggcaucaucaccgacaccaucaagagcuggcgcaacaacauccugcggacgcaggaguccgagugcgcgugcgucaacgggagcugcuucaccgugaugaccgacggcccguccaacggccaggccagcuacaagaucuuccgcaucgagaaggggaagaucgugaaguccgucgagaugaacgcccccaacuaccacuacgaggagugcagcugcuaccccgacuccagcgagaucacgugcgugugccgggacaacuggcacggcuccaaccgccccugggugagcuucaaccagaaccucgaguaccagaucggguacaucugcuccggcaucuucggggacaacccgcggcccaacgacaagaccggcagcugcggccccgucuccagcaacggggccaacggcgugaagggguucgccuucaaguacggcaacgggguguggaucggccgcaccaaguccaucagcagccggaacggcuucgagaugaucugggaccccaacggguggaccggcaccgacaacaacuucuccaucaagcaggacaucgucgggaucaacgaguggagcggcuacuccgggagcuucauccagcacccggagcugacgggccuggacugcauccgccccugcuucuggguggagcucauccggggccgccccaaggagaacaccaucuggaccuccgggagcuccaucagcuucugcggcgucaacuccgacaccgugggguggagcuggcccgacggcgcggagcugccguucacgaucgacaagugaggacuagugcaucacauuuaaaagcaucucagccuaccaugagaauaagagaaagaaaaugaagaucaauagcuuauucaucucuuuuucuuuuucguugguguaaagccaacacccugucuaaaaaacauaaauuucuuuaaucauuuugccucuuuucucugugcuucaauuaauaaaaaauggaaagaaccuagaucuaaaaaaaaaaaaaaaaaaaaaaaaaaaaaaaaaaaaaaaaaaaaaaaaaaaaaaaaaaaaaaaaugcaucccccccccccccccccccccccccccccccaaaggcucuuuucagagccaccagaauu

SEQ ID NO: 224334 - RNA, 1627 nt, Artificial Sequence
  mRNA product Design1 comprising derived and/or modified sequence from neuraminidase__InfluenzaA__AGU92835 (CDS opt1)
gggagaaagcuuaccaugaaccccaaccagaagaucaucaccaucggcagcgugugcaugaccaucgggauggccaaccugauccuccagaucggcaacaucaucuccaucuggaucagccacuccauccagcuggggaaccagaaccagaucgagacgugcaaccagagcgucaucaccuacgagaacaacaccugggugaaccagaccuacgugaacaucuccaacacgaacuucgccgcgggccagagcgucguguccgugaagcuggccgggaacagcucccucugcccggucagcggcugggccaucuacuccaaggacaacagcgugcgcgugggcuccaagggggacgucuucgugauccgggagcccuucaucagcugcagcccccuggagugccgcaccuucuuccugacccagggcgcccuccugaacgacaagcacuccaacgggaccaucaaggaccggucccccuaccgcacgcugaugagcugcccgaucggcgaggugcccucccccuacaacagccgguucgagagcgucgccugguccgcgagcgccugccacgacgggaucaacuggcucaccaucggcaucuccggccccgacaacggggccguggccgugcugaaguacaacggcaucaucaccgacaccaucaagagcuggcgcaacaacauccugcggacgcaggaguccgagugcgcgugcgucaacgggagcugcuucaccgugaugaccgacggcccguccaacggccaggccagcuacaagaucuuccgcaucgagaaggggaagaucgugaaguccgucgagaugaacgcccccaacuaccacuacgaggagugcagcugcuaccccgacuccagcgagaucacgugcgugugccgggacaacuggcacggcuccaaccgccccugggugagcuucaaccagaaccucgaguaccagaucggguacaucugcuccggcaucuucggggacaacccgcggcccaacgacaagaccggcagcugcggccccgucuccagcaacggggccaacggcgugaagggguucuccuucaaguacggcaacgggguguggaucggccgcaccaagagcaucagcucccggaacggcuucgagaugaucugggaccccaacggguggaccggcaccgacaacaacuucagcaucaagcaggacaucgucgggaucaacgagugguccggcuacagcggguccuucgugcagcacccggagcugacgggccuggacugcauccgccccugcuucugggucgagcucauccggggccgccccaaggagaacaccaucuggaccagcggguccagcaucuccuucugcggcgugaacagcgacaccguggggugguccuggcccgacggcgccgagcugccguucacgaucgacaagugaggacuaguuauaagacugacuagcccgaugggccucccaacgggcccuccuccccuccuugcaccgagauuaauaaaaaaaaaaaaaaaaaaaaaaaaaaaaaaaaaaaaaaaaaaaaaaaaaaaaaaaaaaaaaaaaugcaucccccccccccccccccccccccccccccccaaaggcucuuuucagagccaccagaauu

SEQ ID NO: 224335 - RNA, 1792 nt, Artificial Sequence
  mRNA product Design2 comprising derived and/or modified sequence from neuraminidase__InfluenzaA__AGU92835 (CDS opt1)
ggggcgcugccuacggagguggcagccaucuccuucucggcaucaagcuuaccaugaaccccaaccagaagaucaucaccaucggcagcgugugcaugaccaucgggauggccaaccugauccuccagaucggcaacaucaucuccaucuggaucagccacuccauccagcuggggaaccagaaccagaucgagacgugcaaccagagcgucaucaccuacgagaacaacaccugggugaaccagaccuacgugaacaucuccaacacgaacuucgccgcgggccagagcgucguguccgugaagcuggccgggaacagcucccucugcccggucagcggcugggccaucuacuccaaggacaacagcgugcgcgugggcuccaagggggacgucuucgugauccgggagcccuucaucagcugcagcccccuggagugccgcaccuucuuccugacccagggcgcccuccugaacgacaagcacuccaacgggaccaucaaggaccggucccccuaccgcacgcugaugagcugcccgaucggcgaggugcccucccccuacaacagccgguucgagagcgucgccugguccgcgagcgccugccacgacgggaucaacuggcucaccaucggcaucuccggccccgacaacggggccguggccgugcugaaguacaacggcaucaucaccgacaccaucaagagcuggcgcaacaacauccugcggacgcaggaguccgagugcgcgugcgucaacgggagcugcuucaccgugaugaccgacggcccguccaacggccaggccagcuacaagaucuuccgcaucgagaaggggaagaucgugaaguccgucgagaugaacgcccccaacuaccacuacgaggagugcagcugcuaccccgacuccagcgagaucacgugcgugugccgggacaacuggcacggcuccaaccgccccugggugagcuucaaccagaaccucgaguaccagaucggguacaucugcuccggcaucuucggggacaacccgcggcccaacgacaagaccggcagcugcggccccgucuccagcaacggggccaacggcgugaagggguucuccuucaaguacggcaacgggguguggaucggccgcaccaagagcaucagcucccggaacggcuucgagaugaucugggaccccaacggguggaccggcaccgacaacaacuucagcaucaagcaggacaucgucgggaucaacgagugguccggcuacagcggguccuucgugcagcacccggagcugacgggccuggacugcauccgccccugcuucugggucgagcucauccggggccgccccaaggagaacaccaucuggaccagcggguccagcaucuccuucugcggcgugaacagcgacaccguggggugguccuggcccgacggcgccgagcugccguucacgaucgacaagugaggacuagugcaucacauuuaaaagcaucucagccuaccaugagaauaagagaaagaaaaugaagaucaauagcuuauucaucucuuuuucuuuuucguugguguaaagccaacacccugucuaaaaaacauaaauuucuuuaaucauuuugccucuuuucucugugcuucaauuaauaaaaaauggaaagaaccuagaucuaaaaaaaaaaaaaaaaaaaaaaaaaaaaaaaaaaaaaaaaaaaaaaaaaaaaaaaaaaaaaaaaugcaucccccccccccccccccccccccccccccccaaaggcucuuuucagagccaccagaauu

SEQ ID NO: 224336 - RNA, 1627 nt, Artificial Sequence
  mRNA product Design1 comprising derived and/or modified sequence from neuraminidase__InfluenzaA__EPI578429 (CDS opt1) R5176/R5478
gggagaaagcuuaccaugaaccccaaccagaagaucaucaccaucggcagcgugucccugaccaucagcacgaucugcuucuucaugcagaucgccauccucaucaccaccgucacccugcacuucaagcaguacgaguucaacuccccgcccaacaaccaggugaugcugugcgagcccacgaucaucgagcgcaacaucaccgagaucguguaccucaccaacaccacgaucgagaaggagaucugccccaagccggccgaguaccggaacuggagcaagccccagugcgggaucaccggcuucgcgcccuucuccaaggacaacagcauccgccuguccgccgggggcgacaucugggucacccgggagcccuacgugagcugcgacccggacaagugcuaccaguucgcccuggggcagggcaccacgcucaacaacgugcacuccaacaacaccguccgcgaccggacccccuaccgcacccugcugaugaacgagcucggcgugcccuuccaccuggggacgaagcaggucugcaucgccuggagcuccagcuccugccacgacggcaaggccuggcugcacgucugcaucaccggggacgacaagaacgcgaccgccagcuucaucuacaacggccggcucguggacuccguggucagcugguccaaggacauccugcgcacccaggagagcgagugcaucugcaucaacgggacgugcaccguggugaugaccgacggcuccgccagcggcaaggccgacaccaagauccuguucaucgaggaggggaagaucguccacacgagcacccucuccggcagcgcgcagcacguggaggagugcuccugcuacccccgguacccgggggugcgcugcgucugccgggacaacuggaagggcagcaaccgcccgaucguggacaucaacaucaaggaccacuccaucgugagcuccuacgucugcagcggccuggugggggacaccccgcggaagaacgacuccagcuccagcucccacugccuggaccccaacaacgaggagggcgggcacggcgugaaggggugggccuucgacgacggcaacgacgucuggaugggccgcaccaucaacgagacgagccggcucggguacgagaccuucaaggugaucgagggcugguccaacccgaagagcaagcugcagaccaaccgccaggucaucguggaccggggcgaccgcuccggguacagcgggaucuucuccguggagggcaagagcugcaucaaccggugcuucuacgucgagcugauccgcggccggaaggaggagaccgaggugcucuggacgagcaacuccaucguggucuucugcgggaccagcggcaccuacgggaccggcuccuggcccgacggggccgaccugaaccugaugcccaucugaggacuaguuauaagacugacuagcccgaugggccucccaacgggcccuccuccccuccuugcaccgagauuaauaaaaaaaaaaaaaaaaaaaaaaaaaaaaaaaaaaaaaaaaaaaaaaaaaaaaaaaaaaaaaaaaugcaucccccccccccccccccccccccccccccccaaaggcucuuuucagagccaccagaauu

SEQ ID NO: 224337 - RNA, 1792 nt, Artificial Sequence
  mRNA product Design2 comprising derived and/or modified sequence from neuraminidase__InfluenzaA__EPI578429 (CDS opt1)
ggggcgcugccuacggagguggcagccaucuccuucucggcaucaagcuuaccaugaaccccaaccagaagaucaucaccaucggcagcgugucccugaccaucagcacgaucugcuucuucaugcagaucgccauccucaucaccaccgucacccugcacuucaagcaguacgaguucaacuccccgcccaacaaccaggugaugcugugcgagcccacgaucaucgagcgcaacaucaccgagaucguguaccucaccaacaccacgaucgagaaggagaucugccccaagccggccgaguaccggaacuggagcaagccccagugcgggaucaccggcuucgcgcccuucuccaaggacaacagcauccgccuguccgccgggggcgacaucugggucacccgggagcccuacgugagcugcgacccggacaagugcuaccaguucgcccuggggcagggcaccacgcucaacaacgugcacuccaacaacaccguccgcgaccggacccccuaccgcacccugcugaugaacgagcucggcgugcccuuccaccuggggacgaagcaggucugcaucgccuggagcuccagcuccugccacgacggcaaggccuggcugcacgucugcaucaccggggacgacaagaacgcgaccgccagcuucaucuacaacggccggcucguggacuccguggucagcugguccaaggacauccugcgcacccaggagagcgagugcaucugcaucaacgggacgugcaccguggugaugaccgacggcuccgccagcggcaaggccgacaccaagauccuguucaucgaggaggggaagaucguccacacgagcacccucuccggcagcgcgcagcacguggaggagugcuccugcuacccccgguacccgggggugcgcugcgucugccgggacaacuggaagggcagcaaccgcccgaucguggacaucaacaucaaggaccacuccaucgugagcuccuacgucugcagcggccuggugggggacaccccgcggaagaacgacuccagcuccagcucccacugccuggaccccaacaacgaggagggcgggcacggcgugaaggggugggccuucgacgacggcaacgacgucuggaugggccgcaccaucaacgagacgagccggcucggguacgagaccuucaaggugaucgagggcugguccaacccgaagagcaagcugcagaccaaccgccaggucaucguggaccggggcgaccgcuccggguacagcgggaucuucuccguggagggcaagagcugcaucaaccggugcuucuacgucgagcugauccgcggccggaaggaggagaccgaggugcucuggacgagcaacuccaucguggucuucugcgggaccagcggcaccuacgggaccggcuccuggcccgacggggccgaccugaaccugaugcccaucugaggacuagugcaucacauuuaaaagcaucucagccuaccaugagaauaagagaaagaaaaugaagaucaauagcuuauucaucucuuuuucuuuuucguugguguaaagccaacacccugucuaaaaaacauaaauuucuuuaaucauuuugccucuuuucucugugcuucaauuaauaaaaaauggaaagaaccuagaucuaaaaaaaaaaaaaaaaaaaaaaaaaaaaaaaaaaaaaaaaaaaaaaaaaaaaaaaaaaaaaaaaugcaucccccccccccccccccccccccccccccccaaaggcucuuuucagagccaccagaauu

SEQ ID NO: 224338 - RNA, 1627 nt, Artificial Sequence
  mRNA product Design1 comprising derived and/or modified sequence from neuraminidase__InfluenzaA__EPI675797 (CDS opt1)
gggagaaagcuuaccaugaaccccaaccagaagaucaucaccaucggcagcgugucccugaccaucagcacgaucugcuucuucaugcagaucgccauccucaucaccaccgucacccugcacuucaagcaguacgaguucaacuccccgcccaacaaccaggugaugcugugcgagcccacgaucaucgagcgcaacaucaccgagaucguguaccucaccaacaccacgaucgagaaggagaucugccccaagccggccgaguaccggaacuggagcaagccccagugcgggaucaccggcuucgcgcccuucuccaaggacaacagcauccgccuguccgccgggggcgacaucugggucacccgggagcccuacgugagcugcgacccggacaagugcuaccaguucgcccuggggcagggcaccacgcucaacaacgugcacuccaacaacaagguccgcgaccggacccccuaccgcacccugcugaugaacgagcucggcgugcccuuccaccuggggaccaagcaggucugcaucgccuggagcuccagcuccugccacgacggcaaggccuggcugcacgugugcaucacgggggacgacaagaacgcgaccgccagcuucaucuacaacggccggcucguggacuccguggucagcugguccaaggacauccugcgcacccaggagagcgagugcaucugcaucaacgggaccugcacgguggugaugaccgacggcuccgccagcggcaaggccgacaccaagauccuguucaucgaggaggggaagaucguccacaccagcacgcucuccggcagcgcgcagcacguggaggagugcuccugcuacccccgguacccgggggugcgcugcgucugccgggacaacuggaagggcagcaaccgccccaucguggacaucaacaucaaggaccacuccaucgugagcuccuacgucugcagcggccuggugggggacaccccgcggaagaacgacuccagcuccagcucccacugccuggaccccaacaacgaggagggcgggcacggcgugaaggggugggccuucgacgacggcaacgacgucuggaugggccgcaccaucaacgagaccagccggcucggguacgagacguucaaggugaucgagggcugguccaaccccaagagcaagcugcagaccaaccgccaggucaucguggaccgcggggaccgguccggcuacagcgggaucuucuccguggagggcaagagcugcaucaaccggugcuucuacgucgagcugauccgcggccggaaggaggagaccgaggugcucuggaccagcaacuccaucguggucuucugcgggacgagcggcaccuacgggaccggcuccuggcccgacggggccgaccugaaccugaugcccaucugaggacuaguuauaagacugacuagcccgaugggccucccaacgggcccuccuccccuccuugcaccgagauuaauaaaaaaaaaaaaaaaaaaaaaaaaaaaaaaaaaaaaaaaaaaaaaaaaaaaaaaaaaaaaaaaaugcaucccccccccccccccccccccccccccccccaaaggcucuuuucagagccaccagaauu

SEQ ID NO: 224339 - RNA, 1792 nt, Artificial Sequence
  mRNA product Design2 comprising derived and/or modified sequence from neuraminidase__InfluenzaA__EPI675797 (CDS opt1)
ggggcgcugccuacggagguggcagccaucuccuucucggcaucaagcuuaccaugaaccccaaccagaagaucaucaccaucggcagcgugucccugaccaucagcacgaucugcuucuucaugcagaucgccauccucaucaccaccgucacccugcacuucaagcaguacgaguucaacuccccgcccaacaaccaggugaugcugugcgagcccacgaucaucgagcgcaacaucaccgagaucguguaccucaccaacaccacgaucgagaaggagaucugccccaagccggccgaguaccggaacuggagcaagccccagugcgggaucaccggcuucgcgcccuucuccaaggacaacagcauccgccuguccgccgggggcgacaucugggucacccgggagcccuacgugagcugcgacccggacaagugcuaccaguucgcccuggggcagggcaccacgcucaacaacgugcacuccaacaacaagguccgcgaccggacccccuaccgcacccugcugaugaacgagcucggcgugcccuuccaccuggggaccaagcaggucugcaucgccuggagcuccagcuccugccacgacggcaaggccuggcugcacgugugcaucacgggggacgacaagaacgcgaccgccagcuucaucuacaacggccggcucguggacuccguggucagcugguccaaggacauccugcgcacccaggagagcgagugcaucugcaucaacgggaccugcacgguggugaugaccgacggcuccgccagcggcaaggccgacaccaagauccuguucaucgaggaggggaagaucguccacaccagcacgcucuccggcagcgcgcagcacguggaggagugcuccugcuacccccgguacccgggggugcgcugcgucugccgggacaacuggaagggcagcaaccgccccaucguggacaucaacaucaaggaccacuccaucgugagcuccuacgucugcagcggccuggugggggacaccccgcggaagaacgacuccagcuccagcucccacugccuggaccccaacaacgaggagggcgggcacggcgugaaggggugggccuucgacgacggcaacgacgucuggaugggccgcaccaucaacgagaccagccggcucggguacgagacguucaaggugaucgagggcugguccaaccccaagagcaagcugcagaccaaccgccaggucaucguggaccgcggggaccgguccggcuacagcgggaucuucuccguggagggcaagagcugcaucaaccggugcuucuacgucgagcugauccgcggccggaaggaggagaccgaggugcucuggaccagcaacuccaucguggucuucugcgggacgagcggcaccuacgggaccggcuccuggcccgacggggccgaccugaaccugaugcccaucugaggacuagugcaucacauuuaaaagcaucucagccuaccaugagaauaagagaaagaaaaugaagaucaauagcuuauucaucucuuuuucuuuuucguugguguaaagccaacacccugucuaaaaaacauaaauuucuuuaaucauuuugccucuuuucucugugcuucaauuaauaaaaaauggaaagaaccuagaucuaaaaaaaaaaaaaaaaaaaaaaaaaaaaaaaaaaaaaaaaaaaaaaaaaaaaaaaaaaaaaaaaugcaucccccccccccccccccccccccccccccccaaaggcucuuuucagagccaccagaauu

SEQ ID NO: 224340 - RNA, 1567 nt, Artificial Sequence
  mRNA product Design1 comprising derived and/or modified sequence from neuraminidase__InfluenzaA__DQ458993 (CDS opt1) R1706/R1707
gggagaaagcuuaccaugaaccccaaccagaagaucaucaccaucggcagcaucugcauggugaucgggaucgucucccugaugcuccagaucggcaacaugaucagcaucugggugucccacagcauccagaccgggaaccagcggcaggccgagccgaucuccaacacgaaguuccugaccgagaaggccguggcgagcgucacccuggccggcaacuccagccucugccccaucuccgggugggccguguacagcaaggacaacuccauccgcaucggcagccggggcgacguguucgucauccgcgagcccuucaucuccugcagccaccuggagugccggaccuucuuccugacgcagggggcccuccugaacgacaagcacuccaacggcaccaucaaggaccgcagcccccaccggacccugauguccugcccggugggggaggcccccagccccuacaacucccgcuucgagagcguggcguggagcgccuccgccugccacgacggcaccagcuggcucacgaucgggaucuccggccccgacaacggcgccgucgcggugcugaaguacaacgggaucaucaccgacaccaucaagagcuggcggaacaacauccugcgcacccaggaguccgagugcgccugcgugaacggcagcugcuucacggucaugaccgacgggccguccagcggccaggccuccuacaagaucuucaagauggagaagggcaagguggugaagagcgucgagcucgacgcccccaacuaccacuacgaggagugcuccugcuaccccgacgccggggagaucaccugcgugugccgggacaacuggcacggcagcaaccgccccuggguguccuucaaccagaaccuggaguaccagaucggguacaucugcagcggcgucuucggggacaacccgcggcccaacgacggcaccggcuccugcgggcccgugagccccaacggcgcguacggggugaagggcuucuccuucaaguacgggaacggcgucuggaucggccgcacgaagagcaccaacucccggagcggguucgagaugaucugggacccgaacggcuggaccgggaccgacagcuccuucagcgugaagcaggacaucguggccaucacggacugguccggcuacagcggguccuucguccagcaccccgagcugaccggccucgacugcauccgccccugcuucuggguggagcugauccggggccgccccaaggagagcaccaucuggaccuccgggagcuccaucagcuucugcggcgucaacuccgacacggugagcugguccuggccggacggggccgagcugcccuucaccaucgacaagugaggacuaguuauaagacugacuagcccgaugggccucccaacgggcccuccuccccuccuugcaccgagauuaauaaaaaaaaaaaaaaaaaaaaaaaaaaaaaaaaaaaaaaaaaaaaaaaaaaaaaaaaaaaaaaaaugcaucccccccccccccccccccccccccccccccaaaggcucuuuucagagccaccagaauu

SEQ ID NO: 224341 - RNA, 1732 nt, Artificial Sequence
  mRNA product Design2 comprising derived and/or modified sequence from neuraminidase__InfluenzaA__DQ458993 (CDS opt1)
ggggcgcugccuacggagguggcagccaucuccuucucggcaucaagcuuaccaugaaccccaaccagaagaucaucaccaucggcagcaucugcauggugaucgggaucgucucccugaugcuccagaucggcaacaugaucagcaucugggugucccacagcauccagaccgggaaccagcggcaggccgagccgaucuccaacacgaaguuccugaccgagaaggccguggcgagcgucacccuggccggcaacuccagccucugccccaucuccgggugggccguguacagcaaggacaacuccauccgcaucggcagccggggcgacguguucgucauccgcgagcccuucaucuccugcagccaccuggagugccggaccuucuuccugacgcagggggcccuccugaacgacaagcacuccaacggcaccaucaaggaccgcagcccccaccggacccugauguccugcccggugggggaggcccccagccccuacaacucccgcuucgagagcguggcguggagcgccuccgccugccacgacggcaccagcuggcucacgaucgggaucuccggccccgacaacggcgccgucgcggugcugaaguacaacgggaucaucaccgacaccaucaagagcuggcggaacaacauccugcgcacccaggaguccgagugcgccugcgugaacggcagcugcuucacggucaugaccgacgggccguccagcggccaggccuccuacaagaucuucaagauggagaagggcaagguggugaagagcgucgagcucgacgcccccaacuaccacuacgaggagugcuccugcuaccccgacgccggggagaucaccugcgugugccgggacaacuggcacggcagcaaccgccccuggguguccuucaaccagaaccuggaguaccagaucggguacaucugcagcggcgucuucggggacaacccgcggcccaacgacggcaccggcuccugcgggcccgugagccccaacggcgcguacggggugaagggcuucuccuucaaguacgggaacggcgucuggaucggccgcacgaagagcaccaacucccggagcggguucgagaugaucugggacccgaacggcuggaccgggaccgacagcuccuucagcgugaagcaggacaucguggccaucacggacugguccggcuacagcggguccuucguccagcaccccgagcugaccggccucgacugcauccgccccugcuucuggguggagcugauccggggccgccccaaggagagcaccaucuggaccuccgggagcuccaucagcuucugcggcgucaacuccgacacggugagcugguccuggccggacggggccgagcugcccuucaccaucgacaagugaggacuagugcaucacauuuaaaagcaucucagccuaccaugagaauaagagaaagaaaaugaagaucaauagcuuauucaucucuuuuucuuuuucguugguguaaagccaacacccugucuaaaaaacauaaauuucuuuaaucauuuugccucuuuucucugugcuucaauuaauaaaaaauggaaagaaccuagaucuaaaaaaaaaaaaaaaaaaaaaaaaaaaaaaaaaaaaaaaaaaaaaaaaaaaaaaaaaaaaaaaaugcaucccccccccccccccccccccccccccccccaaaggcucuuuucagagccaccagaauu

SEQ ID NO: 224342 - RNA, 1567 nt, Artificial Sequence
  mRNA product Design1 comprising derived and/or modified sequence from neuraminidase__InfluenzaA__AY651445 (CDS opt1) R1704/R1705/R2442
gggagaaagcuuaccaugaaccccaaccagaagaucaucaccaucggcagcaucugcauggugaccgggaucgucucccugaugcuccagaucggcaacaugaucagcaucugggugucccacagcauccacacggggaaccagcaccaguccgagccgaucagcaacaccaaccugcugaccgagaaggccguggccuccgucaagcucgcgggcaacagcucccugugccccaucaacgggugggccguguacagcaaggacaacuccauccggaucggcagcaagggcgacguguucgucauccgcgagcccuucaucuccugcagccaccuggagugccggaccuucuuccucacgcagggggcccugcugaacgacaagcacuccaacggcaccgugaaggaccgcagcccccaccggacccucauguccugcccggugggggaggcccccagccccuacaacucccgcuucgagagcgucgccuggagcgcguccgccugccacgacggcaccagcuggcugacgaucgggaucuccggccccgacaacggcgccguggccgugcugaaguacaacgggaucaucaccgacaccaucaagagcuggcggaacaacauccuccgcacccaggaguccgagugcgcgugcgucaacggcagcugcuucacggugaugaccgacgggccguccaacggccaggccagccacaagaucuucaagauggagaagggcaagguggucaaguccguggagcuggacgcccccaacuaccacuacgaggagugcagcugcuaccccgacgccggggagaucaccugcgugugccgggacaacuggcacggcuccaaccgccccugggucagcuucaaccagaaccuggaguaccagaucggguacaucugcuccggcguguucggggacaacccgcggcccaacgacggcaccggcagcugcgggcccguguccagcaacggcgccgggggcgucaagggguucuccuucaaguacggcaacggcguguggaucgggcgcacgaagagcaccaacucccggagcggcuucgagaugaucugggaccccaacggguggaccgagaccgacagcuccuucagcgugaagcaggacaucgucgcgaucacggacugguccggcuacagcggguccuucgugcagcacccggagcucaccggccuggacugcauccgccccugcuucugggucgagcugauccggggccgccccaaggagagcaccaucuggaccuccgggagcuccaucagcuucugcggcgugaacuccgacacggugggguggagcuggcccgacggcgccgagcucccguucaccaucgacaagugaggacuaguuauaagacugacuagcccgaugggccucccaacgggcccuccuccccuccuugcaccgagauuaauaaaaaaaaaaaaaaaaaaaaaaaaaaaaaaaaaaaaaaaaaaaaaaaaaaaaaaaaaaaaaaaaugcaucccccccccccccccccccccccccccccccaaaggcucuuuucagagccaccagaauu

SEQ ID NO: 224343 - RNA, 1732 nt, Artificial Sequence
  mRNA product Design2 comprising derived and/or modified sequence from neuraminidase__InfluenzaA__AY651445 (CDS opt1)
ggggcgcugccuacggagguggcagccaucuccuucucggcaucaagcuuaccaugaaccccaaccagaagaucaucaccaucggcagcaucugcauggugaccgggaucgucucccugaugcuccagaucggcaacaugaucagcaucugggugucccacagcauccacacggggaaccagcaccaguccgagccgaucagcaacaccaaccugcugaccgagaaggccguggccuccgucaagcucgcgggcaacagcucccugugccccaucaacgggugggccguguacagcaaggacaacuccauccggaucggcagcaagggcgacguguucgucauccgcgagcccuucaucuccugcagccaccuggagugccggaccuucuuccucacgcagggggcccugcugaacgacaagcacuccaacggcaccgugaaggaccgcagcccccaccggacccucauguccugcccggugggggaggcccccagccccuacaacucccgcuucgagagcgucgccuggagcgcguccgccugccacgacggcaccagcuggcugacgaucgggaucuccggccccgacaacggcgccguggccgugcugaaguacaacgggaucaucaccgacaccaucaagagcuggcggaacaacauccuccgcacccaggaguccgagugcgcgugcgucaacggcagcugcuucacggugaugaccgacgggccguccaacggccaggccagccacaagaucuucaagauggagaagggcaagguggucaaguccguggagcuggacgcccccaacuaccacuacgaggagugcagcugcuaccccgacgccggggagaucaccugcgugugccgggacaacuggcacggcuccaaccgccccugggucagcuucaaccagaaccuggaguaccagaucggguacaucugcuccggcguguucggggacaacccgcggcccaacgacggcaccggcagcugcgggcccguguccagcaacggcgccgggggcgucaagggguucuccuucaaguacggcaacggcguguggaucgggcgcacgaagagcaccaacucccggagcggcuucgagaugaucugggaccccaacggguggaccgagaccgacagcuccuucagcgugaagcaggacaucgucgcgaucacggacugguccggcuacagcggguccuucgugcagcacccggagcucaccggccuggacugcauccgccccugcuucugggucgagcugauccggggccgccccaaggagagcaccaucuggaccuccgggagcuccaucagcuucugcggcgugaacuccgacacggugggguggagcuggcccgacggcgccgagcucccguucaccaucgacaagugaggacuagugcaucacauuuaaaagcaucucagccuaccaugagaauaagagaaagaaaaugaagaucaauagcuuauucaucucuuuuucuuuuucguugguguaaagccaacacccugucuaaaaaacauaaauuucuuuaaucauuuugccucuuuucucugugcuucaauuaauaaaaaauggaaagaaccuagaucuaaaaaaaaaaaaaaaaaaaaaaaaaaaaaaaaaaaaaaaaaaaaaaaaaaaaaaaaaaaaaaaaugcaucccccccccccccccccccccccccccccccaaaggcucuuuucagagccaccagaauu

SEQ ID NO: 224344 - RNA, 1567 nt, Artificial Sequence
  mRNA product Design1 comprising derived and/or modified sequence from neuraminidase__InfluenzaA__AAT73329 (CDS opt1)
gggagaaagcuuaccaugaaccccaaccagaagaucaucaccaucggcagcaucugcauggugaccgggaucgucucccugaugcuccagaucggcaacaugaucagcaucugggugucccacagcauccacacggggaaccagcaccaguccgagccgaucagcaacaccaacuuccugaccgagaaggccguggccuccgucaagcuggcgggcaacagcucccucugccccaucaacgggugggccguguacagcaaggacaacuccauccgcaucggcagcaagggcgacguguucgucauccgggagcccuucaucuccugcagccaccuggagugccgcaccuucuuccugacgcagggggcccuccugaacgacaagcacuccaacggcaccgugaaggaccggagcccccaccgcacccugauguccugcccggugggggaggcccccagccccuacaacucccgguucgagagcgucgccuggagcgcguccgccugccacgacggcaccagcuggcucacgaucgggaucuccggccccgacaacggcgccguggccgugcugaaguacaacgggaucaucaccgacaccaucaagagcuggcgcaacaacauccugcggacccaggaguccgagugcgcgugcgucaacggcagcugcuucacggugaugaccgacgggccguccaacggccaggccagccacaagaucuucaagauggagaagggcaagguggucaaguccguggagcucgacgcccccaacuaccacuacgaggagugcagcugcuaccccaacgccggggagaucacgugcgugugccgcgacaacuggcacggcuccaaccggcccugggucagcuucaaccagaaccuggaguaccagaucggguacaucugcuccggcguguucggggacaacccgcgccccaacgacggcaccggcagcugcgggcccguguccagcaacggcgccuacggggucaagggcuucuccuucaaguacgggaacggcguguggaucggccggaccaagagcaccaacucccgcagcggguucgagaugaucugggaccccaacggcuggaccgagaccgacagcuccuucagcgugaagcaggacaucgucgcgaucacggacugguccggguacagcggcuccuucgugcagcacccggagcugaccgggcucgacugcauccggcccugcuucugggucgagcugauccgcggccggcccaaggagagcaccaucuggaccuccggcagcuccaucagcuucugcggggugaacuccgacacggugggcuggagcuggcccgacggggccgagcugccguucaccaucgacaagugaggacuaguuauaagacugacuagcccgaugggccucccaacgggcccuccuccccuccuugcaccgagauuaauaaaaaaaaaaaaaaaaaaaaaaaaaaaaaaaaaaaaaaaaaaaaaaaaaaaaaaaaaaaaaaaaugcaucccccccccccccccccccccccccccccccaaaggcucuuuucagagccaccagaauu

SEQ ID NO: 224345 - RNA, 1732 nt, Artificial Sequence
  mRNA product Design2 comprising derived and/or modified sequence from neuraminidase__InfluenzaA__AAT73329 (CDS opt1)
ggggcgcugccuacggagguggcagccaucuccuucucggcaucaagcuuaccaugaaccccaaccagaagaucaucaccaucggcagcaucugcauggugaccgggaucgucucccugaugcuccagaucggcaacaugaucagcaucugggugucccacagcauccacacggggaaccagcaccaguccgagccgaucagcaacaccaacuuccugaccgagaaggccguggccuccgucaagcuggcgggcaacagcucccucugccccaucaacgggugggccguguacagcaaggacaacuccauccgcaucggcagcaagggcgacguguucgucauccgggagcccuucaucuccugcagccaccuggagugccgcaccuucuuccugacgcagggggcccuccugaacgacaagcacuccaacggcaccgugaaggaccggagcccccaccgcacccugauguccugcccggugggggaggcccccagccccuacaacucccgguucgagagcgucgccuggagcgcguccgccugccacgacggcaccagcuggcucacgaucgggaucuccggccccgacaacggcgccguggccgugcugaaguacaacgggaucaucaccgacaccaucaagagcuggcgcaacaacauccugcggacccaggaguccgagugcgcgugcgucaacggcagcugcuucacggugaugaccgacgggccguccaacggccaggccagccacaagaucuucaagauggagaagggcaagguggucaaguccguggagcucgacgcccccaacuaccacuacgaggagugcagcugcuaccccaacgccggggagaucacgugcgugugccgcgacaacuggcacggcuccaaccggcccugggucagcuucaaccagaaccuggaguaccagaucggguacaucugcuccggcguguucggggacaacccgcgccccaacgacggcaccggcagcugcgggcccguguccagcaacggcgccuacggggucaagggcuucuccuucaaguacgggaacggcguguggaucggccggaccaagagcaccaacucccgcagcggguucgagaugaucugggaccccaacggcuggaccgagaccgacagcuccuucagcgugaagcaggacaucgucgcgaucacggacugguccggguacagcggcuccuucgugcagcacccggagcugaccgggcucgacugcauccggcccugcuucugggucgagcugauccgcggccggcccaaggagagcaccaucuggaccuccggcagcuccaucagcuucugcggggugaacuccgacacggugggcuggagcuggcccgacggggccgagcugccguucaccaucgacaagugaggacuagugcaucacauuuaaaagcaucucagccuaccaugagaauaagagaaagaaaaugaagaucaauagcuuauucaucucuuuuucuuuuucguugguguaaagccaacacccugucuaaaaaacauaaauuucuuuaaucauuuugccucuuuucucugugcuucaauuaauaaaaaauggaaagaaccuagaucuaaaaaaaaaaaaaaaaaaaaaaaaaaaaaaaaaaaaaaaaaaaaaaaaaaaaaaaaaaaaaaaaugcaucccccccccccccccccccccccccccccccaaaggcucuuuucagagccaccagaauu

SEQ ID NO: 224346 - RNA, 1615 nt, Artificial Sequence
  mRNA product Design1 comprising derived and/or modified sequence from neuraminidase__InfluenzaA__EPI439509 (CDS opt1)
gggagaaagcuuaccaugaaccccaaccagaagauccugugcaccagcgccaccgccaucaucaucggcgcgaucgccgugcucaucgggaucgccaaccugggccugaacaucgggcuccaccugaagccgggcugcaacugcucccacagccagcccgagacgaccaacaccucccagaccaucaucaacaacuacuacaacgagacgaacaucaccaacauccagauggaggagcgcaccagccggaacuucaacaaccugaccaaggggcucugcacgaucaacuccuggcacaucuacggcaaggacaacgccguccgcaucggcgagagcuccgacgugcuggugacccgggagcccuacgucagcugcgaccccgacgagugccgcuucuacgcccugucccaggggaccaccauccggggcaagcacagcaacgggacgauccacgaccgcucccaguaccgggcgcucaucagcuggccgcuguccagcccgcccaccguguacaacucccgcguggagugcaucggcuggagcuccaccagcugccacgacgggaagucccggaugagcaucugcaucagcggccccaacaacaacgccuccgccgucgugugguacaaccgccggcccguggccgagaucaacaccugggcgcgcaacauccugcggacgcaggagagcgagugcgucugccacaacggcgugugccccguggucuucaccgacggguccgccaccggccccgccgacacccgcaucuacuacuucaaggaggggaagauccucaagugggagagccugacgggcaccgccaagcacaucgaggagugcuccugcuacggcgagcggaccgggaucacgugcacgugccgcgacaacuggcagggcagcaaccggcccgugauccagaucgacccgguggccaugacccacaccucccaguacaucugcagccccguccugaccgacaacccccgccccaacgacccgaacaucgggaagugcaacgaccccuaccccggcaacaacaacaacggggugaagggcuucuccuaccucgacggcgcgaacaccuggcuggggcggaccaucagcaccgccucccgcagcggcuacgagaugcugaaggugcccaacgcccucaccgacgaccgguccaagccgauccaggggcagacgaucguccugaacgccgacuggagcggcuacuccgggagcuucauggacuacugggccgagggcgacugcuaccgcgcgugcuucuacguggagcugauccgcggccggcccaaggaggacaaggugugguggaccuccaacagcaucgucuccaugugcagcagcaccgaguuccucgggcaguggaacuggcccgacggcgccaagaucgaguacuuccugugaggacuaguuauaagacugacuagcccgaugggccucccaacgggcccuccuccccuccuugcaccgagauuaauaaaaaaaaaaaaaaaaaaaaaaaaaaaaaaaaaaaaaaaaaaaaaaaaaaaaaaaaaaaaaaaaugcaucccccccccccccccccccccccccccccccaaaggcucuuuucagagccaccagaauu

SEQ ID NO: 224347 - RNA, 1780 nt, Artificial Sequence
  mRNA product Design2 comprising derived and/or modified sequence from neuraminidase__InfluenzaA__EPI439509 (CDS opt1)
ggggcgcugccuacggagguggcagccaucuccuucucggcaucaagcuuaccaugaaccccaaccagaagauccugugcaccagcgccaccgccaucaucaucggcgcgaucgccgugcucaucgggaucgccaaccugggccugaacaucgggcuccaccugaagccgggcugcaacugcucccacagccagcccgagacgaccaacaccucccagaccaucaucaacaacuacuacaacgagacgaacaucaccaacauccagauggaggagcgcaccagccggaacuucaacaaccugaccaaggggcucugcacgaucaacuccuggcacaucuacggcaaggacaacgccguccgcaucggcgagagcuccgacgugcuggugacccgggagcccuacgucagcugcgaccccgacgagugccgcuucuacgcccugucccaggggaccaccauccggggcaagcacagcaacgggacgauccacgaccgcucccaguaccgggcgcucaucagcuggccgcuguccagcccgcccaccguguacaacucccgcguggagugcaucggcuggagcuccaccagcugccacgacgggaagucccggaugagcaucugcaucagcggccccaacaacaacgccuccgccgucgugugguacaaccgccggcccguggccgagaucaacaccugggcgcgcaacauccugcggacgcaggagagcgagugcgucugccacaacggcgugugccccguggucuucaccgacggguccgccaccggccccgccgacacccgcaucuacuacuucaaggaggggaagauccucaagugggagagccugacgggcaccgccaagcacaucgaggagugcuccugcuacggcgagcggaccgggaucacgugcacgugccgcgacaacuggcagggcagcaaccggcccgugauccagaucgacccgguggccaugacccacaccucccaguacaucugcagccccguccugaccgacaacccccgccccaacgacccgaacaucgggaagugcaacgaccccuaccccggcaacaacaacaacggggugaagggcuucuccuaccucgacggcgcgaacaccuggcuggggcggaccaucagcaccgccucccgcagcggcuacgagaugcugaaggugcccaacgcccucaccgacgaccgguccaagccgauccaggggcagacgaucguccugaacgccgacuggagcggcuacuccgggagcuucauggacuacugggccgagggcgacugcuaccgcgcgugcuucuacguggagcugauccgcggccggcccaaggaggacaaggugugguggaccuccaacagcaucgucuccaugugcagcagcaccgaguuccucgggcaguggaacuggcccgacggcgccaagaucgaguacuuccugugaggacuagugcaucacauuuaaaagcaucucagccuaccaugagaauaagagaaagaaaaugaagaucaauagcuuauucaucucuuuuucuuuuucguugguguaaagccaacacccugucuaaaaaacauaaauuucuuuaaucauuuugccucuuuucucugugcuucaauuaauaaaaaauggaaagaaccuagaucuaaaaaaaaaaaaaaaaaaaaaaaaaaaaaaaaaaaaaaaaaaaaaaaaaaaaaaaaaaaaaaaaugcaucccccccccccccccccccccccccccccccaaaggcucuuuucagagccaccagaauu

SEQ ID NO: 224348 - RNA, 1618 nt, Artificial Sequence
  mRNA product Design1 comprising derived and/or modified sequence from neuraminidase__InfluenzaB__EPI173278 (CDS opt1) R5175/R5476
gggagaaagcuuaccaugcugcccagcaccauccagacccucacgcuguuccugaccuccggcggggugcuccugagccuguacgucuccgccagccucuccuaccugcuguacagcgacauccuccugaaguucuccccgaccgagaucaccgcccccacgaugccccuggacugcgcgaacgccagcaacgugcaggccgugaaccgcuccgccaccaagggcgucacccuccugcugcccgagccggaguggaccuacccccggcucagcugccccggguccacguuccagaaggcccugcugaucagcccccaccgcuucggcgagaccaaggggaacuccgcgccgcucaucauccgggagcccuucaucgccugcggccccaacgagugcaagcacuucgcccugacccacuacgccgcgcagcccggcggguacuacaacggcacccgcggggaccggaacaagcugcgccaccucaucagcgugaagcugggcaagaucccgacgguggagaacuccaucuuccacauggccgccuggagcggguccgccugccacgacggcaaggaguggaccuacaucggcgucgacgggcccgacaacaacgcccugcucaaggugaaguacggcgaggcguacaccgacaccuaccacagcuacgccaacaagauccugcggacgcaggaguccgccugcaacugcaucgggggcaacugcuaccugaugaucaccgacggcagcgccagcgggguguccgagugccgcuuccucaagauccgggagggccgcaucaucaaggagaucuuccccaccgggcgggucaagcacaccgaggagugcacgugcggcuucgccagcaacaagaccaucgagugcgcgugccgcgacaacuccuacaccgccaagcggcccuucgugaagcugaacguggagaccgacacggccgagauccgccugaugugcaccgacaccuaccucgacaccccgcggcccaacgacgggagcaucacgggccccugcgaguccaacggcgacaaggggagcggcgggaucaagggcggguucguccaccagcgcauggaguccaagaucggccggugguacagccgcaccauguccaagaccgagcggaugggcauggggcuguacgugaaguacgacggcgaccccugggccgacagcgacgcccuggcguucuccggggugauggucagcaugaaggagccgggcugguacuccuucggguucgagaucaaggacaagaagugcgacgugcccugcaucggcaucgagauggugcacgacggcgggaaggagaccuggcacagcgccgccacggccaucuacugccucaugggcuccgggcagcugcugugggacaccgucaccggcguggacauggcccucugaggacuaguuauaagacugacuagcccgaugggccucccaacgggcccuccuccccuccuugcaccgagauuaauaaaaaaaaaaaaaaaaaaaaaaaaaaaaaaaaaaaaaaaaaaaaaaaaaaaaaaaaaaaaaaaaugcaucccccccccccccccccccccccccccccccaaaggcucuuuucagagccaccagaauu

SEQ ID NO: 224349 - RNA, 1783 nt, Artificial Sequence
  mRNA product Design2 comprising derived and/or modified sequence from neuraminidase__InfluenzaB__EPI173278 (CDS opt1)
ggggcgcugccuacggagguggcagccaucuccuucucggcaucaagcuuaccaugcugcccagcaccauccagacccucacgcuguuccugaccuccggcggggugcuccugagccuguacgucuccgccagccucuccuaccugcuguacagcgacauccuccugaaguucuccccgaccgagaucaccgcccccacgaugccccuggacugcgcgaacgccagcaacgugcaggccgugaaccgcuccgccaccaagggcgucacccuccugcugcccgagccggaguggaccuacccccggcucagcugccccggguccacguuccagaaggcccugcugaucagcccccaccgcuucggcgagaccaaggggaacuccgcgccgcucaucauccgggagcccuucaucgccugcggccccaacgagugcaagcacuucgcccugacccacuacgccgcgcagcccggcggguacuacaacggcacccgcggggaccggaacaagcugcgccaccucaucagcgugaagcugggcaagaucccgacgguggagaacuccaucuuccacauggccgccuggagcggguccgccugccacgacggcaaggaguggaccuacaucggcgucgacgggcccgacaacaacgcccugcucaaggugaaguacggcgaggcguacaccgacaccuaccacagcuacgccaacaagauccugcggacgcaggaguccgccugcaacugcaucgggggcaacugcuaccugaugaucaccgacggcagcgccagcgggguguccgagugccgcuuccucaagauccgggagggccgcaucaucaaggagaucuuccccaccgggcgggucaagcacaccgaggagugcacgugcggcuucgccagcaacaagaccaucgagugcgcgugccgcgacaacuccuacaccgccaagcggcccuucgugaagcugaacguggagaccgacacggccgagauccgccugaugugcaccgacaccuaccucgacaccccgcggcccaacgacgggagcaucacgggccccugcgaguccaacggcgacaaggggagcggcgggaucaagggcggguucguccaccagcgcauggaguccaagaucggccggugguacagccgcaccauguccaagaccgagcggaugggcauggggcuguacgugaaguacgacggcgaccccugggccgacagcgacgcccuggcguucuccggggugauggucagcaugaaggagccgggcugguacuccuucggguucgagaucaaggacaagaagugcgacgugcccugcaucggcaucgagauggugcacgacggcgggaaggagaccuggcacagcgccgccacggccaucuacugccucaugggcuccgggcagcugcugugggacaccgucaccggcguggacauggcccucugaggacuagugcaucacauuuaaaagcaucucagccuaccaugagaauaagagaaagaaaaugaagaucaauagcuuauucaucucuuuuucuuuuucguugguguaaagccaacacccugucuaaaaaacauaaauuucuuuaaucauuuugccucuuuucucugugcuucaauuaauaaaaaauggaaagaaccuagaucuaaaaaaaaaaaaaaaaaaaaaaaaaaaaaaaaaaaaaaaaaaaaaaaaaaaaaaaaaaaaaaaaugcaucccccccccccccccccccccccccccccccaaaggcucuuuucagagccaccagaauu

SEQ ID NO: 224350 - RNA, 1618 nt, Artificial Sequence
  mRNA product Design1 comprising derived and/or modified sequence from neuraminidase__InfluenzaB__EPI540672 (CDS opt1)
gggagaaagcuuaccaugcugcccagcaccauccagacccucacgcuguuccugaccuccggcggggugcuccugagccuguacgucuccgccagccucuccuaccugcuguacagcgacauccuccugaaguucucccgcaccgaggugaccgccccgaucaugccccuggacugcgcgaacgccagcaacgugcaggccgucaaccgguccgccacgaagggcgugacgccccuccugcccgagccggaguggaccuacccccgccugagcugccccggguccaccuuccagaaggcccuccugaucagcccccaccgguucggcgagaccaaggggaacuccgcgccgcugaucauccgcgagcccuucaucgccugcggccccaaggagugcaagcacuucgcccucacccacuacgccgcgcagcccggcggguacuacaacggcacccgggaggaccgcaacaagcugcggcaccugaucagcgugaagcucgggaagaucccgaccgucgagaacuccaucuuccacauggccgccuggagcggcuccgccugccacgacgggcgcgaguggacguacaucggcguggacggccccgacagcaacgcccugcugaagaucaaguacggggaggcguacaccgacaccuaccacuccuacgccaagaacauccuccggacccaggagagcgccugcaacugcaucggcggggacugcuaccugaugaucacggacggccccgccagcggcaucuccgagugccgcuuccugaagauccgggaggggcgcaucaucaaggagaucuuccccaccggccgggugaagcacaccgaggagugcacgugcggguucgccagcaacaagaccaucgagugcgcgugccgcgacaacuccuacaccgccaagcggccguucgucaagcucaacguggagaccgacaccgccgagauccgccugaugugcacgaagaccuaccuggacacgccccggcccaacgacggcagcaucaccgggcccugcgaguccgacggcgacgagggcagcgggggcaucaagggcggguucgugcaccagcgcauggccuccaagaucgggcggugguacagccgcaccauguccaagaccaagcggaugggcaugggccucuacgucaaguacgacggggacccguggaccgacagcgaggcccuggcgcuguccggcgugauggugagcauggaggagcccgggugguacuccuucggcuucgagaucaaggacaagaagugcgacguccccugcaucgggaucgagauggugcacgacggcggcaagaccacguggcacagcgccgccaccgccaucuacugccucaugggguccggccagcugcugugggacaccgugaccggggucaacaugacgcucugaggacuaguuauaagacugacuagcccgaugggccucccaacgggcccuccuccccuccuugcaccgagauuaauaaaaaaaaaaaaaaaaaaaaaaaaaaaaaaaaaaaaaaaaaaaaaaaaaaaaaaaaaaaaaaaaugcaucccccccccccccccccccccccccccccccaaaggcucuuuucagagccaccagaauu

SEQ ID NO: 224351 - RNA, 1783 nt, Artificial Sequence
  mRNA product Design2 comprising derived and/or modified sequence from neuraminidase__InfluenzaB__EPI540672 (CDS opt1)
ggggcgcugccuacggagguggcagccaucuccuucucggcaucaagcuuaccaugcugcccagcaccauccagacccucacgcuguuccugaccuccggcggggugcuccugagccuguacgucuccgccagccucuccuaccugcuguacagcgacauccuccugaaguucucccgcaccgaggugaccgccccgaucaugccccuggacugcgcgaacgccagcaacgugcaggccgucaaccgguccgccacgaagggcgugacgccccuccugcccgagccggaguggaccuacccccgccugagcugccccggguccaccuuccagaaggcccuccugaucagcccccaccgguucggcgagaccaaggggaacuccgcgccgcugaucauccgcgagcccuucaucgccugcggccccaaggagugcaagcacuucgcccucacccacuacgccgcgcagcccggcggguacuacaacggcacccgggaggaccgcaacaagcugcggcaccugaucagcgugaagcucgggaagaucccgaccgucgagaacuccaucuuccacauggccgccuggagcggcuccgccugccacgacgggcgcgaguggacguacaucggcguggacggccccgacagcaacgcccugcugaagaucaaguacggggaggcguacaccgacaccuaccacuccuacgccaagaacauccuccggacccaggagagcgccugcaacugcaucggcggggacugcuaccugaugaucacggacggccccgccagcggcaucuccgagugccgcuuccugaagauccgggaggggcgcaucaucaaggagaucuuccccaccggccgggugaagcacaccgaggagugcacgugcggguucgccagcaacaagaccaucgagugcgcgugccgcgacaacuccuacaccgccaagcggccguucgucaagcucaacguggagaccgacaccgccgagauccgccugaugugcacgaagaccuaccuggacacgccccggcccaacgacggcagcaucaccgggcccugcgaguccgacggcgacgagggcagcgggggcaucaagggcggguucgugcaccagcgcauggccuccaagaucgggcggugguacagccgcaccauguccaagaccaagcggaugggcaugggccucuacgucaaguacgacggggacccguggaccgacagcgaggcccuggcgcuguccggcgugauggugagcauggaggagcccgggugguacuccuucggcuucgagaucaaggacaagaagugcgacguccccugcaucgggaucgagauggugcacgacggcggcaagaccacguggcacagcgccgccaccgccaucuacugccucaugggguccggccagcugcugugggacaccgugaccggggucaacaugacgcucugaggacuagugcaucacauuuaaaagcaucucagccuaccaugagaauaagagaaagaaaaugaagaucaauagcuuauucaucucuuuuucuuuuucguugguguaaagccaacacccugucuaaaaaacauaaauuucuuuaaucauuuugccucuuuucucugugcuucaauuaauaaaaaauggaaagaaccuagaucuaaaaaaaaaaaaaaaaaaaaaaaaaaaaaaaaaaaaaaaaaaaaaaaaaaaaaaaaaaaaaaaaugcaucccccccccccccccccccccccccccccccaaaggcucuuuucagagccaccagaauu

SEQ ID NO: 224352 - RNA, 1618 nt, Artificial Sequence
  mRNA product Design1 comprising derived and/or modified sequence from neuraminidase__InfluenzaB__NP_056663 (CDS opt1)
gggagaaagcuuaccaugcugcccagcaccgugcagacccucacgcugcugcucaccuccggcgggguccugcugagccucuacguguccgccagccuguccuaccugcucuacagcgacgugcugcugaaguucuccagcaccaagaccacggccccgaccaugucccucgagugcaccaacgcgagcaacgcccagaccgucaaccacuccgccacgaaggagaugaccuucccgccgcccgagcccgaguggaccuacccccgccugagcugccagggcuccaccuuccagaaggcccugcucaucagcccccaccgguucggggagaucaagggcaacuccgcgccccugaucauccgcgagcccuucguggccugcgggcccaaggagugccggcacuucgcccugacgcacuacgccgcccagcccggcggcuacuacaacgggacccgcaaggaccggaacaagcuccgccaccuggugagcgucaagcugggcaagauccccaccguggagaacuccaucuuccacauggcggccuggagcggguccgccugccacgacggccgggaguggaccuacaucgggguggacggcccggacaacgacgcccucgucaagaucaaguacggcgaggccuacacggacaccuaccacagcuacgcgcacaacauccugcgcacccaggagagcgccugcaacugcaucgggggcgacugcuaccugaugaucaccgacggguccgccagcggcaucuccaagugccgguuccucaagauccgcgagggccggaucaucaaggagauccugcccacggggcgcguggagcacaccgaggagugcacgugcggcuucgccagcaacaagaccaucgagugcgccugccgggacaacuccuacaccgcgaagcgccccuucgugaagcugaacgucgagaccgacaccgccgagauccggcucaugugcaccaagacguaccuggacacgccccgcccggacgacgggagcaucgccggccccugcgaguccaacggggacaaguggcugggcggcaucaagggcggguucgugcaccagcggauggccagcaagaucgggcgcugguacucccggaccaugagcaagaccaaccgcaugggcauggagcucuacgugaaguacgacggggaccccuggaccgacuccgacgcccugacccugagcggcgucaugguguccaucgaggagcccggcugguacagcuucggguucgagaucaaggacaagaagugcgacgugccgugcaucggcaucgagaugguccacgacgggggcaaggacaccuggcacuccgcggccaccgccaucuacugccucauggggagcggccagcugcugugggacacggugaccggcguggacauggcccucugaggacuaguuauaagacugacuagcccgaugggccucccaacgggcccuccuccccuccuugcaccgagauuaauaaaaaaaaaaaaaaaaaaaaaaaaaaaaaaaaaaaaaaaaaaaaaaaaaaaaaaaaaaaaaaaaugcaucccccccccccccccccccccccccccccccaaaggcucuuuucagagccaccagaauu

SEQ ID NO: 224353 - RNA, 1783 nt, Artificial Sequence
  mRNA product Design2 comprising derived and/or modified sequence from neuraminidase__InfluenzaB__NP_056663 (CDS opt1)
ggggcgcugccuacggagguggcagccaucuccuucucggcaucaagcuuaccaugcugcccagcaccgugcagacccucacgcugcugcucaccuccggcgggguccugcugagccucuacguguccgccagccuguccuaccugcucuacagcgacgugcugcugaaguucuccagcaccaagaccacggccccgaccaugucccucgagugcaccaacgcgagcaacgcccagaccgucaaccacuccgccacgaaggagaugaccuucccgccgcccgagcccgaguggaccuacccccgccugagcugccagggcuccaccuuccagaaggcccugcucaucagcccccaccgguucggggagaucaagggcaacuccgcgccccugaucauccgcgagcccuucguggccugcgggcccaaggagugccggcacuucgcccugacgcacuacgccgcccagcccggcggcuacuacaacgggacccgcaaggaccggaacaagcuccgccaccuggugagcgucaagcugggcaagauccccaccguggagaacuccaucuuccacauggcggccuggagcggguccgccugccacgacggccgggaguggaccuacaucgggguggacggcccggacaacgacgcccucgucaagaucaaguacggcgaggccuacacggacaccuaccacagcuacgcgcacaacauccugcgcacccaggagagcgccugcaacugcaucgggggcgacugcuaccugaugaucaccgacggguccgccagcggcaucuccaagugccgguuccucaagauccgcgagggccggaucaucaaggagauccugcccacggggcgcguggagcacaccgaggagugcacgugcggcuucgccagcaacaagaccaucgagugcgccugccgggacaacuccuacaccgcgaagcgccccuucgugaagcugaacgucgagaccgacaccgccgagauccggcucaugugcaccaagacguaccuggacacgccccgcccggacgacgggagcaucgccggccccugcgaguccaacggggacaaguggcugggcggcaucaagggcggguucgugcaccagcggauggccagcaagaucgggcgcugguacucccggaccaugagcaagaccaaccgcaugggcauggagcucuacgugaaguacgacggggaccccuggaccgacuccgacgcccugacccugagcggcgucaugguguccaucgaggagcccggcugguacagcuucggguucgagaucaaggacaagaagugcgacgugccgugcaucggcaucgagaugguccacgacgggggcaaggacaccuggcacuccgcggccaccgccaucuacugccucauggggagcggccagcugcugugggacacggugaccggcguggacauggcccucugaggacuagugcaucacauuuaaaagcaucucagccuaccaugagaauaagagaaagaaaaugaagaucaauagcuuauucaucucuuuuucuuuuucguugguguaaagccaacacccugucuaaaaaacauaaauuucuuuaaucauuuugccucuuuucucugugcuucaauuaauaaaaaauggaaagaaccuagaucuaaaaaaaaaaaaaaaaaaaaaaaaaaaaaaaaaaaaaaaaaaaaaaaaaaaaaaaaaaaaaaaaugcaucccccccccccccccccccccccccccccccaaaggcucuuuucagagccaccagaauu

SEQ ID NO: 224354 - RNA, 1618 nt, Artificial Sequence
  mRNA product Design1 comprising derived and/or modified sequence from neuraminidase__InfluenzaB__ABG85180 (CDS opt1)
gggagaaagcuuaccaugcugcccagcaccgugcagacccucacgcugcugcucaccuccggcgggguccugcugagccucuacguguccgccagccuguccuaccugcucuacagcgacgugcugcugaaguucuccagcaccaagaccacggccccgaccaugucccucgagugcaccaacgcgagcaacgcccagaccgucaacuacuccgccacgaaggagaugaccuucccgccgcccgagcccgaguggaccuacccccgccugagcugccagggcuccaccuuccagaaggcccugcucaucagcccccaccgguucggggagaucaagggcaacuccgcgccccugaucauccgcgagcccuucguggccugcgggcccaaggagugccggcacuucgcccugacgcacuacgccgcccagcccggcggcuacuaccacgggacccgcaaggaccggaacaagcuccgccaccuggugagcgucaagcugggcaagauccccaccguggagaacuccaucuuccacauggcggccuggagcggguccgccugccacgacggccgggaguggaccuacaucgggguggacggcccggacaacgacgcccucgucaagaucaaguacggcgaggccuacacggacaccuaccacagcuacgcgcacaacauccugcgcacccaggagagcgccugcaacugcaucgggggcgacugcuaccugaugaucaccgacggguccgccagcggcaucuccaagugccgguuccucaagauccgcgagggccggaucaucaaggagauccugcccacggggcgcguggagcacaccgaggagugcacgugcggcuucgccagcaacaagaccaucgagugcgccugccgggacaacuccuacaccgcgaagcgccccuucgugaagcugaacgucgagaccgacaccgccgagauccggcucaugugcaccaagacguaccuggacacgccccgcccggacgacgggagcaucgccggccccugcgaguccaacggggacaagggccugggcgggaucaagggcggguucgugcaccagcggauggccuucaagaucggccgcugguacagccggaccauguccaagaccaaccgcauggggauggagcucuacgugaaguacgacggcgaccccuggaccgacagcgacgcccugacccuguccggcgucauggugagcaucgaggagcccgggugguacuccuucggcuucgagaucaaggacaagaagugcgacgugccgugcaucgggaucgagaugguccacgacggcggggaggacaccuggcacagcgcggccaccgccaucuacugccucaugggcuccggccagcugcugugggacacggugaccgggaucgacauggcccucugaggacuaguuauaagacugacuagcccgaugggccucccaacgggcccuccuccccuccuugcaccgagauuaauaaaaaaaaaaaaaaaaaaaaaaaaaaaaaaaaaaaaaaaaaaaaaaaaaaaaaaaaaaaaaaaaugcaucccccccccccccccccccccccccccccccaaaggcucuuuucagagccaccagaauu

SEQ ID NO: 224355 - RNA, 1783 nt, Artificial Sequence
  mRNA product Design2 comprising derived and/or modified sequence from neuraminidase__InfluenzaB__ABG85180 (CDS opt1)
ggggcgcugccuacggagguggcagccaucuccuucucggcaucaagcuuaccaugcugcccagcaccgugcagacccucacgcugcugcucaccuccggcgggguccugcugagccucuacguguccgccagccuguccuaccugcucuacagcgacgugcugcugaaguucuccagcaccaagaccacggccccgaccaugucccucgagugcaccaacgcgagcaacgcccagaccgucaacuacuccgccacgaaggagaugaccuucccgccgcccgagcccgaguggaccuacccccgccugagcugccagggcuccaccuuccagaaggcccugcucaucagcccccaccgguucggggagaucaagggcaacuccgcgccccugaucauccgcgagcccuucguggccugcgggcccaaggagugccggcacuucgcccugacgcacuacgccgcccagcccggcggcuacuaccacgggacccgcaaggaccggaacaagcuccgccaccuggugagcgucaagcugggcaagauccccaccguggagaacuccaucuuccacauggcggccuggagcggguccgccugccacgacggccgggaguggaccuacaucgggguggacggcccggacaacgacgcccucgucaagaucaaguacggcgaggccuacacggacaccuaccacagcuacgcgcacaacauccugcgcacccaggagagcgccugcaacugcaucgggggcgacugcuaccugaugaucaccgacggguccgccagcggcaucuccaagugccgguuccucaagauccgcgagggccggaucaucaaggagauccugcccacggggcgcguggagcacaccgaggagugcacgugcggcuucgccagcaacaagaccaucgagugcgccugccgggacaacuccuacaccgcgaagcgccccuucgugaagcugaacgucgagaccgacaccgccgagauccggcucaugugcaccaagacguaccuggacacgccccgcccggacgacgggagcaucgccggccccugcgaguccaacggggacaagggccugggcgggaucaagggcggguucgugcaccagcggauggccuucaagaucggccgcugguacagccggaccauguccaagaccaaccgcauggggauggagcucuacgugaaguacgacggcgaccccuggaccgacagcgacgcccugacccuguccggcgucauggugagcaucgaggagcccgggugguacuccuucggcuucgagaucaaggacaagaagugcgacgugccgugcaucgggaucgagaugguccacgacggcggggaggacaccuggcacagcgcggccaccgccaucuacugccucaugggcuccggccagcugcugugggacacggugaccgggaucgacauggcccucugaggacuagugcaucacauuuaaaagcaucucagccuaccaugagaauaagagaaagaaaaugaagaucaauagcuuauucaucucuuuuucuuuuucguugguguaaagccaacacccugucuaaaaaacauaaauuucuuuaaucauuuugccucuuuucucugugcuucaauuaauaaaaaauggaaagaaccuagaucuaaaaaaaaaaaaaaaaaaaaaaaaaaaaaaaaaaaaaaaaaaaaaaaaaaaaaaaaaaaaaaaaugcaucccccccccccccccccccccccccccccccaaaggcucuuuucagagccaccagaauu

SEQ ID NO: 224356 - RNA, 1618 nt, Artificial Sequence
  mRNA product Design1 comprising derived and/or modified sequence from neuraminidase__InfluenzaB__EPI376345 (CDS opt1)
gggagaaagcuuaccaugcugcccagcaccauccagacccucacgcuguuccugaccuccggcggggugcuccugagccuguacgucuccgccagccucuccuaccugcuguacagcgacauccuccugaaguucucccagaccgagaucaccgccccgaucaugccccuggacugcgcgaacgccagcaacgugcaggccgugaaccacuccgccgccaagggcgucacgcuccugcugcccgagcccgaguggaccuacccgcgccucagcugccccggguccaccuuccagaaggcgcugcugaucagcccccaccgguucggcgagaucaaggggaacuccgcgccccucaucauccgcgagccguucaucgccugcggccccaccgagugcaagcacuucgcccugacgcacuacgccgcccagcccggcggguacuacaacggcacccgggaggaccgcaacaagcugcggcaccucaucagcgugaagcuggggaagauccccaccguggagaacuccaucuuccacauggccgccuggagcggcuccgccugccacgacgggaaggaguggaccuacaucggcgucgacggcccggacagcaacgcgcugcucaagaucaaguacggggaggccuacacggacaccuaccacuccuacgccaagaacauccugcgcacccaggagagcgccugcaacugcaucggcggggacugcuaccugaugaucaccgacggccccgccagcggcguguccgagugccgguuccucaagauccgcgaggggcggaucaucaaggagaucuuccccacgggccgcgugaagcacaccgaggagugcacgugcggguucgcgagcaacaagaccaucgagugcgccugccgggacaaccgcuacaccgccaagcggcccuucgucaagcugaacguggagaccgacaccgccgagauccgccugaugugcaccgagacguaccucgacaccccgcggcccaacgacggcuccaucaccgggcccugcgagagcgacggcgacaagggcuccgggggcaucaagggcggguucgugcaccagcgcauggccagcaagaucgggcggugguacucccgcaccaugagcaagacgaagcggaugggcaugggccuguacgucaaguacgacggggaccccuggaccgacuccgaggcgcuggcccucagcggcgugaugguguccauggaggagccggggugguacagcuucggcuucgagaucaaggacaagaagugcgacguccccugcaucgggaucgagauggugcacgacggcggcaagaccaccuggcacuccgccgccacggccaucuacugccugauggggagcggccagcugcucugggacaccgugaccggggucgacauggcgcugugaggacuaguuauaagacugacuagcccgaugggccucccaacgggcccuccuccccuccuugcaccgagauuaauaaaaaaaaaaaaaaaaaaaaaaaaaaaaaaaaaaaaaaaaaaaaaaaaaaaaaaaaaaaaaaaaugcaucccccccccccccccccccccccccccccccaaaggcucuuuucagagccaccagaauu

SEQ ID NO: 224357 - RNA, 1783 nt, Artificial Sequence
  mRNA product Design2 comprising derived and/or modified sequence from neuraminidase__InfluenzaB__EPI376345 (CDS opt1)
ggggcgcugccuacggagguggcagccaucuccuucucggcaucaagcuuaccaugcugcccagcaccauccagacccucacgcuguuccugaccuccggcggggugcuccugagccuguacgucuccgccagccucuccuaccugcuguacagcgacauccuccugaaguucucccagaccgagaucaccgccccgaucaugccccuggacugcgcgaacgccagcaacgugcaggccgugaaccacuccgccgccaagggcgucacgcuccugcugcccgagcccgaguggaccuacccgcgccucagcugccccggguccaccuuccagaaggcgcugcugaucagcccccaccgguucggcgagaucaaggggaacuccgcgccccucaucauccgcgagccguucaucgccugcggccccaccgagugcaagcacuucgcccugacgcacuacgccgcccagcccggcggguacuacaacggcacccgggaggaccgcaacaagcugcggcaccucaucagcgugaagcuggggaagauccccaccguggagaacuccaucuuccacauggccgccuggagcggcuccgccugccacgacgggaaggaguggaccuacaucggcgucgacggcccggacagcaacgcgcugcucaagaucaaguacggggaggccuacacggacaccuaccacuccuacgccaagaacauccugcgcacccaggagagcgccugcaacugcaucggcggggacugcuaccugaugaucaccgacggccccgccagcggcguguccgagugccgguuccucaagauccgcgaggggcggaucaucaaggagaucuuccccacgggccgcgugaagcacaccgaggagugcacgugcggguucgcgagcaacaagaccaucgagugcgccugccgggacaaccgcuacaccgccaagcggcccuucgucaagcugaacguggagaccgacaccgccgagauccgccugaugugcaccgagacguaccucgacaccccgcggcccaacgacggcuccaucaccgggcccugcgagagcgacggcgacaagggcuccgggggcaucaagggcggguucgugcaccagcgcauggccagcaagaucgggcggugguacucccgcaccaugagcaagacgaagcggaugggcaugggccuguacgucaaguacgacggggaccccuggaccgacuccgaggcgcuggcccucagcggcgugaugguguccauggaggagccggggugguacagcuucggcuucgagaucaaggacaagaagugcgacguccccugcaucgggaucgagauggugcacgacggcggcaagaccaccuggcacuccgccgccacggccaucuacugccugauggggagcggccagcugcucugggacaccgugaccggggucgacauggcgcugugaggacuagugcaucacauuuaaaagcaucucagccuaccaugagaauaagagaaagaaaaugaagaucaauagcuuauucaucucuuuuucuuuuucguugguguaaagccaacacccugucuaaaaaacauaaauuucuuuaaucauuuugccucuuuucucugugcuucaauuaauaaaaaauggaaagaaccuagaucuaaaaaaaaaaaaaaaaaaaaaaaaaaaaaaaaaaaaaaaaaaaaaaaaaaaaaaaaaaaaaaaaugcaucccccccccccccccccccccccccccccccaaaggcucuuuucagagccaccagaauu

SEQ ID NO: 224358 - protein, 676 aa, Artificial Sequence
  derived and/or modified protein sequence from glycoprotein__ZEBOV__AIG96616
MGVTGILQLPRDRFKRTSFFLWVIILFQRTFSIPLGVIHNSTLQVSDVDKLVCRDKLSSTNQLRSVGLNLEGNGVATDVPSVTKRWGFRSGVPPKVVNYEAGEWAENCYNLEIKKPDGSECLPAAPDGIRGFPRCRYVHKVSGTGPCAGDFAFHKEGAFFLYDRLASTVIYRGTTFAEGVVAFLILPQAKKDFFSSHPLREPVNATEDPSSGYYSTTIRYQATGFGTNETEYLFEVDNLTYVQLESRFTPQFLLQLNETIYASGKRSNTTGKLIWKVNPEIDTTIGEWAFWETKKNLTRKIRSEELSFTAVSNGPKNISGQSPARTSSDPETNTTNEDHKIMASENSSAMVQVHSQGRKAAVSHLTTLATISTSPQPPTTKTGPDNSTHNTPVYKLDISEATQVGQHHRRADNDSTASDTPPATTAAGPLKAENTNTSKSADSLDLATTTSPQNYSETAGNNNTHHQDTGEESASSGKLGLITNTIAGVAGLITGGRRTRREVIVNAQPKCNPNLHYWTTQDEGAAIGLAWIPYFGPAAEGIYTEGLMHNQDGLICGLRQLANETTQALQLFLRATTELRTFSILNRKAIDFLLQRWGGTCHILGPDCCIEPHDWTKNITDKIDQIIHDFVDKTLPDQGDNDNWWTGWRQWIPAGIGVTGVIIAVIALFCICKFVF

SEQ ID NO: 224359 - RNA, 2031 nt, Artificial Sequence
  derived and/or modified CDS sequence (wt) from glycoprotein__ZEBOV__AIG96616
auggguguuacaggaauauugcaguuaccucgugaucgauucaagaggacaucauucuuucuuuggguaauuauccuuuuccaaagaacauuuuccaucccgcuuggaguuauccacaauaguacauuacagguuagugaugucgacaaacuaguuugucgugacaaacugucauccacaaaucaauugagaucaguuggacugaaucucgaggggaauggaguggcaacugacgugccaucugugacuaaaagauggggcuucagguccggugucccaccaaagguggucaauuaugaagcuggugaaugggcugaaaacugcuacaaucuugaaaucaaaaaaccugacgggagugagugucuaccagcagcgccagacgggauucggggcuucccccggugccgguaugugcacaaaguaucaggaacgggaccaugugccggagacuuugccuuccacaaagagggugcuuucuuccuguaugaucgacuugcuuccacaguuaucuaccgaggaacgacuuucgcugaaggugucguugcauuucugauacugccccaagcuaagaaggacuucuucagcucacaccccuugagagagccggucaaugcaacggaggacccgucgaguggcuauuauucuaccacaauuagauaucaggcuaccgguuuuggaacuaaugagacagaguacuuguucgagguugacaauuugaccuacguccaacuugaaucaagauucacaccacaguuucugcuccagcugaaugagacaauauaugcaagugggaagaggagcaacaccacgggaaaacuaauuuggaaggucaaccccgaaauugauacaacaaucggggagugggccuucugggaaacuaaaaaaaaccucacuagaaaaauucgcagugaagaguugucuuucacagcuguaucaaacggacccaaaaacaucaguggucagaguccggcgcgaacuucuuccgacccagagaccaacacaacaaaugaagaccacaaaaucauggcuucagaaaauuccucugcaaugguucaagugcacagucaaggaaggaaagcugcagugucgcaucugacaacccuugccacaaucuccacgaguccucaaccucccacaaccaaaacagguccggacaacagcacccauaauacacccguguauaaacuugacaucucugaggcaacucaaguuggacaacaucaccguagagcagacaacgacagcacagccuccgacacuccccccgccacgaccgcagccggacccuuaaaagcagagaacaccaacacgaguaagagcgcugacucccuggaccucgccaccacgacaagcccccaaaacuacagcgagacugcuggcaacaacaacacucaucaccaagauaccggagaagagagugccagcagcgggaagcuaggcuuaauuaccaauacuauugcuggaguagcaggacugaucacaggcgggagaaggacucgaagagaaguaauugucaaugcucaacccaaaugcaaccccaauuuacauuacuggacuacucaggaugaaggugcugcaaucggauuggccuggauaccauauuucgggccagcagccgaaggaauuuacacagaggggcuaaugcacaaccaagaugguuuaaucuguggguugaggcagcuggccaacgaaacgacucaagcucuccaacuguuccugagagccacaacugagcugcgaaccuuuucaauccucaaccguaaggcaauugacuuccugcugcagcgaugggguggcacaugccacauuuugggaccggacugcuguaucgaaccacaugauuggaccaagaacauaacagacaaaauugaucagauuauucaugauuuuguugauaaaacccuuccggaccagggggacaaugacaauugguggacaggauggagacaauggauaccggcagguauuggaguuacagguguuauaauugcaguuaucgcuuuauucuguauaugcaaauuugucuuuuag

SEQ ID NO: 224360 - RNA, 2031 nt, Artificial Sequence
  derived and/or modified CDS sequence (opt1) from glycoprotein__ZEBOV__AIG96616
augggcgugaccgggauccugcagcucccccgcgaccgguucaagcgcaccagcuucuuccugugggucaucauccuguuccagcggacguucuccaucccgcucggcgugauccacaacagcacccugcagguguccgacgucgacaagcuggugugccgcgacaagcucagcuccaccaaccagcugcggagcguggggcugaaccucgagggcaacggggucgccaccgacgugcccuccgugacgaagcgcuggggcuuccggagcggcgucccgcccaagguggugaacuacgaggccggggagugggcggagaacugcuacaaccuggagaucaagaagcccgacggcuccgagugccugcccgccgcccccgacgggauccgcggcuucccccggugccgcuacguccacaaggugagcgggaccggcccgugcgccggcgacuucgccuuccacaaggagggggcguucuuccucuacgaccggcuggccuccaccgugaucuaccgcggcaccacguucgccgagggggucguggccuuccugauccucccccaggcgaagaaggacuucuucagcucccacccccugcgggagcccgugaacgccaccgaggacccgagcuccggcuacuacagcaccaccauccgcuaccaggccacgggcuucgggaccaacgagaccgaguaccuguucgaggucgacaaccucaccuacgugcagcuggagucccgguucacgccccaguuccugcuccagcugaacgagaccaucuacgccagcggcaagcgcuccaacaccaccgggaagcugaucuggaaggugaaccccgagaucgacacgaccaucggcgagugggccuucugggagaccaagaagaaccucacccggaagauccgcagcgaggagcugagcuucacggcggucuccaacgggcccaagaacaucagcggccaguccccggcccggaccagcuccgaccccgagaccaacaccacgaacgaggaccacaagaucauggccagcgagaacuccagcgccauggugcaggugcacucccagggccgcaaggccgcggucagccaccugaccacccucgccaccaucuccacgagcccccagcccccgaccaccaagaccgggcccgacaacuccacgcacaacacccccguguacaagcuggacaucagcgaggccacccaggucggccagcaccaccggcgcgccgacaacgacuccaccgccagcgacaccccgccggcgacgaccgccgccgggccccugaaggccgagaacaccaacaccuccaagagcgccgacucccucgaccuggcgacgaccaccagcccccagaacuacagcgagaccgccggcaacaacaacacgcaccaccaggacaccggggaggaguccgccagcuccggcaagcugggccucaucaccaacaccaucgccgggguggcgggccugaucacgggcgggcgccggacccgccgggaggugaucgucaacgcccagcccaagugcaacccgaaccugcacuacuggaccacccaggacgagggggccgccaucggccucgccuggauccccuacuucggccccgcggccgaggggaucuacacggagggccugaugcacaaccaggacgggcugaucugcggccuccgccagcuggccaacgagaccacccaggcccugcagcucuuccugcgggccaccacggagcugcgcaccuucagcauccucaaccggaaggcgaucgacuuccugcugcagcgcuggggcgggaccugccacauccugggcccggacugcugcaucgagccccacgacuggaccaagaacaucacggacaagaucgaccagaucauccacgacuucguggacaagacccuccccgaccagggggacaacgacaacugguggaccggcuggcggcaguggauccccgccgggaucggcgugaccggcgucaucaucgccgugaucgcccuguucugcaucugcaaguucguguucuga

SEQ ID NO: 224361 - RNA, 2248 nt, Artificial Sequence
  mRNA product Design1 comprising derived and/or modified sequence from glycoprotein__ZEBOV__AIG96616 (CDS opt1)
gggagaaagcuuaccaugggcgugaccgggauccugcagcucccccgcgaccgguucaagcgcaccagcuucuuccugugggucaucauccuguuccagcggacguucuccaucccgcucggcgugauccacaacagcacccugcagguguccgacgucgacaagcuggugugccgcgacaagcucagcuccaccaaccagcugcggagcguggggcugaaccucgagggcaacggggucgccaccgacgugcccuccgugacgaagcgcuggggcuuccggagcggcgucccgcccaagguggugaacuacgaggccggggagugggcggagaacugcuacaaccuggagaucaagaagcccgacggcuccgagugccugcccgccgcccccgacgggauccgcggcuucccccggugccgcuacguccacaaggugagcgggaccggcccgugcgccggcgacuucgccuuccacaaggagggggcguucuuccucuacgaccggcuggccuccaccgugaucuaccgcggcaccacguucgccgagggggucguggccuuccugauccucccccaggcgaagaaggacuucuucagcucccacccccugcgggagcccgugaacgccaccgaggacccgagcuccggcuacuacagcaccaccauccgcuaccaggccacgggcuucgggaccaacgagaccgaguaccuguucgaggucgacaaccucaccuacgugcagcuggagucccgguucacgccccaguuccugcuccagcugaacgagaccaucuacgccagcggcaagcgcuccaacaccaccgggaagcugaucuggaaggugaaccccgagaucgacacgaccaucggcgagugggccuucugggagaccaagaagaaccucacccggaagauccgcagcgaggagcugagcuucacggcggucuccaacgggcccaagaacaucagcggccaguccccggcccggaccagcuccgaccccgagaccaacaccacgaacgaggaccacaagaucauggccagcgagaacuccagcgccauggugcaggugcacucccagggccgcaaggccgcggucagccaccugaccacccucgccaccaucuccacgagcccccagcccccgaccaccaagaccgggcccgacaacuccacgcacaacacccccguguacaagcuggacaucagcgaggccacccaggucggccagcaccaccggcgcgccgacaacgacuccaccgccagcgacaccccgccggcgacgaccgccgccgggccccugaaggccgagaacaccaacaccuccaagagcgccgacucccucgaccuggcgacgaccaccagcccccagaacuacagcgagaccgccggcaacaacaacacgcaccaccaggacaccggggaggaguccgccagcuccggcaagcugggccucaucaccaacaccaucgccgggguggcgggccugaucacgggcgggcgccggacccgccgggaggugaucgucaacgcccagcccaagugcaacccgaaccugcacuacuggaccacccaggacgagggggccgccaucggccucgccuggauccccuacuucggccccgcggccgaggggaucuacacggagggccugaugcacaaccaggacgggcugaucugcggccuccgccagcuggccaacgagaccacccaggcccugcagcucuuccugcgggccaccacggagcugcgcaccuucagcauccucaaccggaaggcgaucgacuuccugcugcagcgcuggggcgggaccugccacauccugggcccggacugcugcaucgagccccacgacuggaccaagaacaucacggacaagaucgaccagaucauccacgacuucguggacaagacccuccccgaccagggggacaacgacaacugguggaccggcuggcggcaguggauccccgccgggaucggcgugaccggcgucaucaucgccgugaucgcccuguucugcaucugcaaguucguguucugaggacuaguuauaagacugacuagcccgaugggccucccaacgggcccuccuccccuccuugcaccgagauuaauaaaaaaaaaaaaaaaaaaaaaaaaaaaaaaaaaaaaaaaaaaaaaaaaaaaaaaaaaaaaaaaaugcaucccccccccccccccccccccccccccccccaaaggcucuuuucagagccaccagaauu

SEQ ID NO: 224362 - RNA, 2413 nt, Artificial Sequence
  mRNA product Design2 comprising derived and/or modified sequence from glycoprotein__ZEBOV__AIG96616 (CDS opt1)
ggggcgcugccuacggagguggcagccaucuccuucucggcaucaagcuuaccaugggcgugaccgggauccugcagcucccccgcgaccgguucaagcgcaccagcuucuuccugugggucaucauccuguuccagcggacguucuccaucccgcucggcgugauccacaacagcacccugcagguguccgacgucgacaagcuggugugccgcgacaagcucagcuccaccaaccagcugcggagcguggggcugaaccucgagggcaacggggucgccaccgacgugcccuccgugacgaagcgcuggggcuuccggagcggcgucccgcccaagguggugaacuacgaggccggggagugggcggagaacugcuacaaccuggagaucaagaagcccgacggcuccgagugccugcccgccgcccccgacgggauccgcggcuucccccggugccgcuacguccacaaggugagcgggaccggcccgugcgccggcgacuucgccuuccacaaggagggggcguucuuccucuacgaccggcuggccuccaccgugaucuaccgcggcaccacguucgccgagggggucguggccuuccugauccucccccaggcgaagaaggacuucuucagcucccacccccugcgggagcccgugaacgccaccgaggacccgagcuccggcuacuacagcaccaccauccgcuaccaggccacgggcuucgggaccaacgagaccgaguaccuguucgaggucgacaaccucaccuacgugcagcuggagucccgguucacgccccaguuccugcuccagcugaacgagaccaucuacgccagcggcaagcgcuccaacaccaccgggaagcugaucuggaaggugaaccccgagaucgacacgaccaucggcgagugggccuucugggagaccaagaagaaccucacccggaagauccgcagcgaggagcugagcuucacggcggucuccaacgggcccaagaacaucagcggccaguccccggcccggaccagcuccgaccccgagaccaacaccacgaacgaggaccacaagaucauggccagcgagaacuccagcgccauggugcaggugcacucccagggccgcaaggccgcggucagccaccugaccacccucgccaccaucuccacgagcccccagcccccgaccaccaagaccgggcccgacaacuccacgcacaacacccccguguacaagcuggacaucagcgaggccacccaggucggccagcaccaccggcgcgccgacaacgacuccaccgccagcgacaccccgccggcgacgaccgccgccgggccccugaaggccgagaacaccaacaccuccaagagcgccgacucccucgaccuggcgacgaccaccagcccccagaacuacagcgagaccgccggcaacaacaacacgcaccaccaggacaccggggaggaguccgccagcuccggcaagcugggccucaucaccaacaccaucgccgggguggcgggccugaucacgggcgggcgccggacccgccgggaggugaucgucaacgcccagcccaagugcaacccgaaccugcacuacuggaccacccaggacgagggggccgccaucggccucgccuggauccccuacuucggccccgcggccgaggggaucuacacggagggccugaugcacaaccaggacgggcugaucugcggccuccgccagcuggccaacgagaccacccaggcccugcagcucuuccugcgggccaccacggagcugcgcaccuucagcauccucaaccggaaggcgaucgacuuccugcugcagcgcuggggcgggaccugccacauccugggcccggacugcugcaucgagccccacgacuggaccaagaacaucacggacaagaucgaccagaucauccacgacuucguggacaagacccuccccgaccagggggacaacgacaacugguggaccggcuggcggcaguggauccccgccgggaucggcgugaccggcgucaucaucgccgugaucgcccuguucugcaucugcaaguucguguucugaggacuagugcaucacauuuaaaagcaucucagccuaccaugagaauaagagaaagaaaaugaagaucaauagcuuauucaucucuuuuucuuuuucguugguguaaagccaacacccugucuaaaaaacauaaauuucuuuaaucauuuugccucuuuucucugugcuucaauuaauaaaaaauggaaagaaccuagaucuaaaaaaaaaaaaaaaaaaaaaaaaaaaaaaaaaaaaaaaaaaaaaaaaaaaaaaaaaaaaaaaaugcaucccccccccccccccccccccccccccccccaaaggcucuuuucagagccaccagaauu

SEQ ID NO: 224363 - RNA, 1543 nt, Artificial Sequence
  mRNA product Design2 comprising derived and/or modified sequence from ovalbumin__Gallus gallus__NP_990483 (CDS opt1)
ggggcgcugccuacggagguggcagccaucuccuucucggcaucaagcuuaccaugggcagcaucggggccgcgucgauggaguucugcuucgacguguucaaggagcugaagguccaccacgccaacgagaacaucuucuacugcccgaucgccaucaugagcgcgcucgccaugguguaccugggcgccaaggacagcacccggacgcagaucaacaaggugguccgcuucgacaagcugcccggcuucggggacucgaucgaggcgcagugcggcaccagcgugaacgugcacagcucgcuccgggacauccugaaccagaucaccaagccgaacgacgucuacagcuucagccuggccucgcggcucuacgccgaggagcgcuacccgauccugcccgaguaccugcagugcgugaaggagcucuaccggggcgggcuggagccgaucaacuuccagacggcggccgaccaggcccgggagcugaucaacagcuggguggagagccagaccaacggcaucauccgcaacguccuccagccgucgagcguggacagccagaccgcgauggugcuggucaacgccaucguguucaagggccugugggagaagacguucaaggacgaggacacccaggccaugcccuuccgggugaccgagcaggagucgaagccgguccagaugauguaccagaucgggcucuuccggguggcgagcauggccagcgagaagaugaagauccuggagcugccguucgccucgggcacgaugagcaugcucgugcugcugcccgacgaggucagcggccucgagcagcuggagucgaucaucaacuucgagaagcugaccgaguggaccagcagcaacgugauggaggagcgcaagaucaagguguaccucccgcggaugaagauggaggagaaguacaaccugacgucgguccugauggcgauggggaucaccgacguguucagcagcucggccaaccucagcggcaucagcucggccgagagccugaagaucagccaggcggugcacgccgcccacgcggagaucaacgaggccggccgggaggucguggggucggccgaggcgggcguggacgccgccagcgucagcgaggaguuccgcgcggaccacccguuccuguucugcaucaagcacaucgccaccaacgccgugcucuucuucggccggugcgugucgcccugaccacuagugcaucacauuuaaaagcaucucagccuaccaugagaauaagagaaagaaaaugaagaucaauagcuuauucaucucuuuuucuuuuucguugguguaaagccaacacccugucuaaaaaacauaaauuucuuuaaucauuuugccucuuuucucugugcuucaauuaauaaaaaauggaaagaaccuagaucuaaaaaaaaaaaaaaaaaaaaaaaaaaaaaaaaaaaaaaaaaaaaaaaaaaaaaaaaaaaaaaaaugcaucccccccccccccccccccccccccccccccaaaggcucuuuucagagccaccagaauu

SEQ ID NO: 224364 - RNA, 1936 nt, Artificial Sequence
  mRNA product Design2 comprising derived and/or modified sequence from tyrosinase-related protein-2__Mus musculus__CAA44951 (CDS opt1)
ggggcgcugccuacggagguggcagccaucuccuucucggcaucaagcuuaccaugggccuggugggguggggccuccugcuggggugccucggcugcgggauccugcugcgggcccgcgcccaguucccccgggucugcaugacccucgacggcgugcugaacaaggagugcugcccgccccugggccccgaggcgaccaacaucugcggguuccucgagggccgcgggcagugcgccgaggugcagacggacacccggcccuggagcggcccguacauccugcgcaaccaggacgaccgggagcaguggccccgcaaguucuucaaccggaccugcaagugcaccgggaacuucgccggcuacaacugcggcgggugcaaguucggcuggacggggcccgacugcaaccgcaagaagcccgccauccugcggcgcaacauccacucccucaccgcccaggagcgggagcaguuccugggcgcgcuggaccucgccaagaagagcauccacccggacuacgucaucaccacccagcacuggcugggccugcucgggcccaacggcacgcagccccagaucgccaacugcuccguguacgacuucuucguguggcugcacuacuacagcguccgcgacacccugcucgggcccggccggccguacaaggccaucgacuucucccaccaggggcccgcguucgugaccuggcaccgcuaccaccugcuguggcucgagcgggagcugcagcgccugaccggcaacgagagcuucgcccuccccuacuggaacuucgccacgggcaagaacgagugcgacgugugcaccgacgacuggcugggggccgcccggcaggacgaccccacccugaucucccgcaacagccgguucuccaccugggagaucgucugcgacagccucgacgacuacaaccgccgggugacgcugugcaacggcaccuacgaggggcugcuccggcgcaacaaggugggccggaacaacgagaagcugccgacccugaagaacguccaggacugccucucccugcagaaguucgacagcccccccuucuuccagaacuccaccuucagcuuccgcaacgcgcuggagggguucgacaaggccgacggcacgcucgacucccaggugaugaaccugcacaaccuggcccacagcuuccucaacggcaccaacgcccugccccacuccgccgcgaacgacccgguguucgucgugcugcacagcuucaccgacgccaucuucgacgaguggcucaagcggaacaaccccuccaccgacgccuggccccaggagcuggcccccaucgggcacaaccgcauguacaacauggugccguucuucccgcccgucacgaacgaggagcuguuccugaccgccgagcagcucggcuacaacuacgcgguggaccugagcgaggaggaggcccccguguggagcaccacccuguccgucgugaucgggauccucggcgccuucgugcugcugcucgggcugcuggccuuccuccaguaccggcgccugcggaagggcuacgccccgcugauggagacgggccucagcuccaagcgcuacaccgaggaggcgugaccacuagugcaucacauuuaaaagcaucucagccuaccaugagaauaagagaaagaaaaugaagaucaauagcuuauucaucucuuuuucuuuuucguugguguaaagccaacacccugucuaaaaaacauaaauuucuuuaaucauuuugccucuuuucucugugcuucaauuaauaaaaaauggaaagaaccuagaucuaaaaaaaaaaaaaaaaaaaaaaaaaaaaaaaaaaaaaaaaaaaaaaaaaaaaaaaaaaaaaaaaugcaucccccccccccccccccccccccccccccccaaaggcucuuuucagagccaccagaauu
